(19) United States
(12) Patent Application Publication
(10) Pub. No.: US 2002/0156011 A1
(43) Pub. Date: Oct. 24, 2002

(54) Compositions and methods for the therapy and diagnosis of colon cancer

(75) Inventors: Yuqiu Jiang, Kent, WA (US); Susan L. Harlocker, Seattle, WA (US); Heather Secrist, Seattle, WA (US); Aijun Wang, Issaquah, WA (US); John A. Stolk, Bothell, WA (US)

Correspondence Address: SEED INTELLECTUAL PROPERTY LAW GROUP PLLC, 701 FIFTH AVE, SUITE 6300, SEATTLE, WA, 98104-7092, US

(73) Assignee: Corixa Corporation, Seattle, WA (US)

(21) Appl. No.: 10/046,935

(22) Filed: Jan. 15, 2002

Related U.S. Application Data
(63) Continuation-in-part of application No. 09/878,178, filed on Jun. 8, 2001.
(60) Provisional application No. 60/270,216, filed on Feb. 20, 2001.
(60) Provisional application No. 60/210,899, filed on Jun. 9, 2000.

(51) Int. Cl. A61K 38/17; A61K 48/00; C07H 21/04; C07K 14/435

(52) U.S. Cl. 514/12; 514/44; 530/350; 536/23.1

(57) ABSTRACT

Compositions and methods for the therapy and diagnosis of cancer, such as colon cancer, are disclosed. Compositions may comprise one or more colon tumor proteins, immunogenic portions thereof, or polynucleotides that encode such portions. Alternatively, a therapeutic composition may comprise an antigen presenting cell that expresses a colon tumor protein, or a T cell that is specific for cells expressing such a protein. Such compositions may be used, for example, for the prevention and treatment of diseases such as colon cancer. Diagnostic methods based on detecting a colon tumor protein, or mRNA encoding such a protein, in a sample are also provided.

### STATEMENT REGARDING SEQUENCE LISTING

[0001] The Sequence Listing associated with this application is provided on CD-ROM in lieu of a paper copy, and is hereby incorporated by reference into the specification. Three CD-ROMs are provided, containing identical copies of the sequence listing: CD-ROM No. 1 is labeled COPY 1, contains the file 527cl.app which is 1.2 MB and created on Jan. 15, 2002; CD-ROM No. 2 is labeled COPY 2, contains the file 527cl.app which is 1.2 MB and created on Jan. 15, 2002; CD-ROM No. 3 is labeled CRF, contains the file 527cl.app which is 1.2 MB and created on Jan. 15, 2002.

### BACKGROUND OF THE INVENTION

[0002] 1. Field of the Invention

[0003] The present invention relates generally to therapy and diagnosis of cancer, such as colon cancer. The invention is more specifically related to polypeptides comprising at least a portion of a colon tumor protein, and to polynucleotides encoding such polypeptides. Such polypeptides and polynucleotides may be used in vaccines and pharmaceutical compositions for prevention and treatment of colon malignancies, and for the diagnosis and monitoring of such cancers.

[0004] 2. Description of the Related Art

[0005] Cancer is a significant health problem throughout the world. Although advances have been made in detection and therapy of cancer, no vaccine or other universally successful method for prevention or treatment is currently available. Current therapies, which are generally based on a combination of chemotherapy or surgery and radiation, continue to prove inadequate in many patients.

[0006] Colon cancer is the second most frequently diagnosed malignancy in the United States as well as the second most common cause of cancer death. The five-year survival rate for patients with colorectal cancer detected in an early localized stage is 92%; unfortunately, only 37% of colorectal cancer is diagnosed at this stage. The survival rate drops to 64% if the cancer is allowed to spread to adjacent organs or lymph nodes, and to 7% in patients with distant metastases.

[0007] The prognosis of colon cancer is directly related to the degree of penetration of the tumor through the bowel wall and the presence or absence of nodal involvement, consequently early detection and treatment are especially important. Currently, diagnosis is aided by the use of screening assays for fecal occult blood, sigrnoidoscopy, colonoscopy and double contrast barium enemas. Treatment regimens are determined by the type and stage of the cancer, and include surgery, radiation therapy and/or chemotherapy. Recurrence following surgery (the most common form of therapy) is a major problem and is often the ultimate cause of death.

[0008] In spite of considerable research into therapies for these and other cancers, colon cancer remains difficult to diagnose and treat effectively. Accordingly, there is a need in the art for improved methods for detecting and treating such cancers. The present invention fulfills these needs and further provides other related advantages.

### BRIEF SUMMARY OF THE INVENTION

[0009] In one aspect, the present invention provides polynucleotide compositions comprising a sequence selected from the group consisting of:

[0010] (a) sequences provided in SEQ ID NOs:1-2234 and 2238;

[0011] (b) complements of the sequences provided in SEQ ID NOs:1-2234 and 2238;

[0012] (c) sequences consisting of at least 20, 25, 30, 35, 40, 45, 50, 75 and 100 contiguous residues of a sequence provided in SEQ ID NOs:1-2234 and 2238;

[0013] (d) sequences that hybridize to a sequence provided in SEQ ID NOs:1-2234 and 2238, under moderate or highly stringent conditions;

[0014] (e) sequences having at least 75%, 80%, 85%, 90%, 95%, 96%, 97%, 98% or 99% identity to a sequence of SEQ ID NOs:1-2234 and 2238;

[0015] (f) degenerate variants of a sequence provided in SEQ ID NOs:1-2234 and 2238.

[0016] In one preferred embodiment, the polynucleotide compositions of the invention are expressed in at least about 20%, more preferably in at least about 30%, and most preferably in at least about 50% of colon tumor samples tested, at a level that is at least about 2-fold, preferably at least about 5-fold, and most preferably at least about 10-fold higher than that for normal tissues.

[0017] The present invention, in another aspect, provides polypeptide compositions comprising an amino acid sequence that is encoded by a polynucleotide sequence described above.

[0018] The present invention further provides polypeptide compositions comprising an amino acid sequence selected from the group consisting of the sequences recited in SEQ ID NOs:2235 and 2239.

[0019] In certain preferred embodiments, the polypeptides and/or polynucleotides of the present invention are immunogenic, i.e., they are capable of eliciting an immune response, particularly a humoral and/or cellular immune response, as further described herein.

[0020] The present invention further provides fragments, variants and/or derivatives of the disclosed polypeptide and/or polynucleotide sequences, wherein the fragments, variants and/or derivatives preferably have a level of immunogenic activity of at least about 50%, preferably at least about 70% and more preferably at least about 90% of the level of immunogenic activity of a polypeptide sequence set forth in SEQ ID NOs:2235 and 2239 or a polypeptide sequence encoded by a polynucleotide sequence set forth in SEQ ID NOs:1-2234 and 2238.

[0021] The present invention further provides polynucleotides that encode a polypeptide described above, expression vectors comprising such polynucleotides and host cells transformed or transfected with such expression vectors.

[0022] Within other aspects, the present invention provides pharmaceutical compositions comprising a polypeptide or polynucleotide as described above and a physiologically acceptable carrier.

[0023] Within a related aspect of the present invention, the pharmaceutical compositions, e.g., vaccine compositions, are provided for prophylactic or therapeutic applications. Such compositions generally comprise an immunogenic polypeptide or polynucleotide of the invention and an immunostimulant, such as an adjuvant.

[0024] The present invention further provides pharmaceutical compositions that comprise: (a) an antibody or antigen-binding fragment thereof that specifically binds to a polypeptide of the present invention, or a fragment thereof; and (b) a physiologically acceptable carrier.

[0025] Within further aspects, the present invention provides pharmaceutical compositions comprising: (a) an antigen presenting cell that expresses a polypeptide as described above and (b) a pharmaceutically acceptable carrier or excipient. Illustrative antigen presenting cells include dendritic cells, macrophages, monocytes, fibroblasts and B cells.

[0026] Within related aspects, pharmaceutical compositions are provided that comprise: (a) an antigen presenting cell that expresses a polypeptide as described above and (b) an immunostimulant.

[0027] The present invention further provides, in other aspects, fusion proteins that comprise at least one polypeptide as described above, as well as polynucleotides encoding such fusion proteins, typically in the form of pharmaceutical compositions, e.g., vaccine compositions, comprising a physiologically acceptable carrier and/or an immunostimulant. The fusions proteins may comprise multiple immunogenic polypeptides or portions/variants thereof, as described herein, and may further comprise one or more polypeptide segments for facilitating the expression, purification and/or immunogenicity of the polypeptide(s).

[0028] Within further aspects, the present invention provides methods for stimulating an immune response in a patient, preferably a T cell response in a human patient, comprising administering a pharmaceutical composition described herein. The patient may be afflicted with colon cancer, in which case the methods provide treatment for the disease, or patient considered at risk for such a disease may be treated prophylactically.

[0029] Within further aspects, the present invention provides methods for inhibiting the development of a cancer in a patient, comprising administering to a patient a pharmaceutical composition as recited above. The patient may be afflicted with colon cancer, in which case the methods provide treatment for the disease, or patient considered at risk for such a disease may be treated prophylactically.

[0030] The present invention further provides, within other aspects, methods for removing tumor cells from a biological sample, comprising contacting a biological sample with T cells that specifically react with a polypeptide of the present invention, wherein the step of contacting is performed under conditions and for a time sufficient to permit the removal of cells expressing the protein from the sample.

[0031] Within related aspects, methods are provided for inhibiting the development of a cancer in a patient, comprising administering to a patient a biological sample treated as described above.

[0032] Methods are further provided, within other aspects, for stimulating and/or expanding T cells specific for a polypeptide of the present invention, comprising contacting T cells with one or more of: (i) a polypeptide as described above; (ii) a polynucleotide encoding such a polypeptide; and/or (iii) an antigen presenting cell that expresses such a polypeptide; under conditions and for a time sufficient to permit the stimulation and/or expansion of T cells. Isolated T cell populations comprising T cells prepared as described above are also provided.

[0033] Within further aspects, the present invention provides methods for inhibiting the development of a cancer in a patient, comprising administering to a patient an effective amount of a T cell population as described above.

[0034] The present invention further provides methods for inhibiting the development of a cancer in a patient, comprising the steps of: (a) incubating CD4⁺ and/or CD8⁺ T cells isolated from a patient with one or more of: (i) a polypeptide comprising at least an immunogenic portion of polypeptide disclosed herein; (ii) a polynucleotide encoding such a polypeptide; and (iii) an antigen-presenting cell that expressed such a polypeptide; and (b) administering to the patient an effective amount of the proliferated T cells, and thereby inhibiting the development of a cancer in the patient. Proliferated cells may, but need not, be cloned prior to administration to the patient.

[0035] Within further aspects, the present invention provides methods for determining the presence or absence of a cancer, preferably a colon cancer, in a patient comprising: (a) contacting a biological sample obtained from a patient with a binding agent that binds to a polypeptide as recited above; (b) detecting in the sample an amount of polypeptide that binds to the binding agent; and (c) comparing the amount of polypeptide with a predetermined cut-off value, and therefrom determining the presence or absence of a cancer in the patient. Within preferred embodiments, the binding agent is an antibody, more preferably a monoclonal antibody.

[0036] The present invention also provides, within other aspects, methods for monitoring the progression of a cancer in a patient. Such methods comprise the steps of: (a) contacting a biological sample obtained from a patient at a first point in time with a binding agent that binds to a polypeptide as recited above; (b) detecting in the sample an amount of polypeptide that binds to the binding agent; (c) repeating steps (a) and (b) using a biological sample obtained from the patient at a subsequent point in time; and (d) comparing the amount of polypeptide detected in step (c) with the amount detected in step (b) and therefrom monitoring the progression of the cancer in the patient.

[0037] The present invention further provides, within other aspects, methods for determining the presence or absence of a cancer in a patient, comprising the steps of: (a) contacting a biological sample, e.g., tumor sample, serum sample, etc., obtained from a patient with an oligonucleotide that hybridizes to a polynucleotide that encodes a polypeptide of the present invention; (b) detecting in the sample a level of a polynucleotide, preferably mRNA, that hybridizes to the oligonucleotide; and (c) comparing the level of polynucleotide that hybridizes to the oligonucleotide with a predetermined cut-off value, and therefrom determining the presence or absence of a cancer in the patient. Within certain embodiments, the amount of mRNA is detected via polymerase chain reaction using, for example, at least one oligonucleotide primer that hybridizes to a polynucleotide encoding a polypeptide as recited above, or a complement of such a polynucleotide. Within other embodiments, the amount of mRNA is detected using a hybridization technique, employing an oligonucleotide probe that hybridizes to a polynucleotide that encodes a polypeptide as recited above, or a complement of such a polynucleotide.

[0038] In related aspects, methods are provided for monitoring the progression of a cancer in a patient, comprising the steps of: (a) contacting a biological sample obtained from a patient with an oligonucleotide that hybridizes to a polynucleotide that encodes a polypeptide of the present invention; (b) detecting in the sample an amount of a polynucleotide that hybridizes to the oligonucleotide; (c) repeating steps (a) and (b) using a biological sample obtained from the patient at a subsequent point in time; and (d) comparing the amount of polynucleotide detected in step (c) with the amount detected in step (b) and therefrom monitoring the progression of the cancer in the patient.

[0039] Within further aspects, the present invention provides antibodies, such as monoclonal antibodies, that bind to a polypeptide as described above, as well as diagnostic kits comprising such antibodies. Diagnostic kits comprising one or more oligonucleotide probes or primers as described above are also provided.

[0040] These and other aspects of the present invention will become apparent upon reference to the following detailed description. All references disclosed herein are hereby incorporated by reference in their entirety as if each was incorporated individually.

### BRIEF DESCRIPTION OF THE SEQUENCE IDENTIFIERS

[0041] SEQ ID NOs:1-2231 are the cDNA sequences of clones identified from the PCR subtracted differential colon tumor and colon metastatic tumor cDNA libraries as described in Example 1.

[0042] SEQ ID NO:2232 is the determined full-length consensus cDNA sequence for C931P.

[0043] SEQ ID NO:2233 is the determined cDNA sequence of a partially spliced form of C931P.

[0044] SEQ ID NO:2234 is the determined cDNA of the predicted coding portion of C931P.

[0045] SEQ ID NO:2235 is the predicted C931P full-length protein sequence.

[0046] SEQ ID NO:2236 is a PCR primer.

[0047] SEQ ID NO:2237 is a PCR primer.

[0048] SEQ ID NO:2238 is the determined cDNA sequence of the C931P-pET28b expression contstruct.

[0049] SEQ ID NO:2239 is the predicted amino acid sequence of the recombinant C931P-pET28b expression protein.

### DETAILED DESCRIPTION OF THE INVENTION

[0050] The present invention is directed generally to compositions and their use in the therapy and diagnosis of cancer, particularly colon cancer. As described further below, illustrative compositions of the present invention include, but are not restricted to, polypeptides, particularly immunogenic polypeptides, polynucleotides encoding such polypeptides, antibodies and other binding agents, antigen presenting cells (APCs) and immune system cells (e.g., T cells).

[0051] The practice of the present invention will employ, unless indicated specifically to the contrary, conventional methods of virology, immunology, microbiology, molecular biology and recombinant DNA techniques within the skill of the art, many of which are described below for the purpose of illustration. Such techniques are explained fully in the literature. See, e.g., Sambrook, et al. Molecular Cloning: A Laboratory Manual (2nd Edition, 1989); Maniatis et al. Molecular Cloning: A Laboratory Manual (1982); DNA Cloning: A Practical Approach, vol. I & II (D. Glover, ed.); Oligonucleotide Synthesis (N. Gait, ed., 1984); Nucleic Acid Hybridization (B. Hames & S. Higgins, eds., 1985); Transcription and Translation (B. Hames & S. Higgins, eds., 1984); Animal Cell Culture (R. Freshney, ed., 1986); Perbal, A Practical Guide to Molecular Cloning (1984).

[0052] All publications, patents and patent applications cited herein, whether supra or infra, are hereby incorporated by reference in their entirety.

[0053] As used in this specification and the appended claims, the singular forms “a,” “an” and “the” include plural references unless the content clearly dictates otherwise. POLYPEPTIDE COMPOSITIONS

[0054] As used herein, the term “polypeptide” “is used in its conventional meaning, i.e., as a sequence of amino acids. The polypeptides are not limited to a specific length of the product; thus, peptides, oligopeptides, and proteins are included within the definition of polypeptide, and such terms may be used interchangeably herein unless specifically indicated otherwise. This term also does not refer to or exclude post-expression modifications of the polypeptide, for example, glycosylations, acetylations, phosphorylations and the like, as well as other modifications known in the art, both naturally occurring and non-naturally occurring. A polypeptide may be an entire protein, or a subsequence thereof. Particular polypeptides of interest in the context of this invention are amino acid subsequences comprising epitopes, i.e., antigenic determinants substantially responsible for the immunogenic properties of a polypeptide and being capable of evoking an immune response.

[0055] Particularly illustrative polypeptides of the present invention comprise those encoded by a polynucleotide sequence set forth in any one of SEQ ID NOs:1-2234 and 2238, or a sequence that hybridizes under moderately stringent conditions, or, alternatively, under highly stringent conditions, to a polynucleotide sequence set forth in any one of SEQ ID NOs:1-2234 and 2238. Certain other illustrative polypeptides of the invention comprise amino acid sequences as set forth in SEQ ID NOs:2235 and 2239.

[0056] The polypeptides of the present invention are sometimes herein referred to as colon tumor proteins or colon tumor polypeptides, as an indication that their identification has been based at least in part upon their increased levels of expression in colon tumor samples. Thus, a “colon tumor polypeptide” or “colon tumor protein,” refers generally to a polypeptide sequence of the present invention, or a polynucleotide sequence encoding such a polypeptide, that is expressed in a substantial proportion of colon tumor samples, for example preferably greater than about 20%, more preferably greater than about 30%, and most preferably greater than about 50% or more of colon tumor samples tested, at a level that is at least two fold, and preferably at least five fold, greater than the level of expression in normal tissues, as determined using a representative assay provided herein. A colon tumor polypeptide sequence of the invention, based upon its increased level of expression in tumor cells, has particular utility both as a diagnostic marker as well as a therapeutic target, as further described below.

[0057] In certain preferred embodiments, the polypeptides of the invention are immunogenic, i e., they react detectably within an immunoassay (such as an ELISA or T-cell stimulation assay) with antisera and/or T-cells from a patient with colon cancer. Screening for immunogenic activity can be performed using techniques well known to the skilled artisan. For example, such screens can be performed using methods such as those described in Harlow and Lane, Antibodies: A Laboratory Manual, Cold Spring Harbor Laboratory, 1988. In one illustrative example, a polypeptide may be immobilized on a solid support and contacted with patient sera to allow binding of antibodies within the sera to the immobilized polypeptide. Unbound sera may then be removed and bound antibodies detected using, for example, ¹²⁵I-labeled Protein A.

[0058] As would be recognized by the skilled artisan, immunogenic portions of the polypeptides disclosed herein are also encompassed by the present invention. An “immunogenic portion,” as used herein, is a fragment of an immunogenic polypeptide of the invention that itself is immunologically reactive (i.e., specifically binds) with the B-cells and/or T-cell surface antigen receptors that recognize the polypeptide. Immunogenic portions may generally be identified using well known techniques, such as those summarized in Paul, Fundamental Immunology, 3rd ed., 243-247 (Raven Press, 1993) and references cited therein. Such techniques include screening polypeptides for the ability to react with antigen-specific antibodies, antisera and/or T-cell lines or clones. As used herein, antisera and antibodies are “antigen-specific” if they specifically bind to an antigen (i.e., they react with the protein in an ELISA or other immunoassay, and do not react detectably with unrelated proteins). Such antisera and antibodies may be prepared as described herein, and using well-known techniques.

[0059] In one preferred embodiment, an immunogenic portion of a polypeptide of the present invention is a portion that reacts with antisera and/or T-cells at a level that is not substantially less than the reactivity of the full-length polypeptide (e.g., in an ELISA and/or T-cell reactivity assay). Preferably, the level of immunogenic activity of the immunogenic portion is at least about 50%, preferably at least about 70% and most preferably greater than about 90% of the immunogenicity for the full-length polypeptide. In some instances, preferred immunogenic portions will be identified that have a level of immunogenic activity greater than that of the corresponding full-length polypeptide, e.g., having greater than about 100% or 150% or more immunogenic activity.

[0060] In certain other embodiments, illustrative immunogenic portions may include peptides in which an N-terminal leader sequence and/or transmembrane domain have been deleted. Other illustrative immunogenic portions will contain a small N- and/or C-terminal deletion (e.g., 1-30 amino acids, preferably 5-15 amino acids), relative to the mature protein.

[0061] In another embodiment, a polypeptide composition of the invention may also comprise one or more polypeptides that are immunologically reactive with T cells and/or antibodies generated against a polypeptide of the invention, particularly a polypeptide having an amino acid sequence disclosed herein, or to an immunogenic fragment or variant thereof.

[0062] In another embodiment of the invention, polypeptides are provided that comprise one or more polypeptides that are capable of eliciting T cells and/or antibodies that are immunologically reactive with one or more polypeptides described herein, or one or more polypeptides encoded by contiguous nucleic acid sequences contained in the polynucleotide sequences disclosed herein, or immunogenic fragments or variants thereof, or to one or more nucleic acid sequences which hybridize to one or more of these sequences under conditions of moderate to high stringency.

[0063] The present invention, in another aspect, provides polypeptide fragments comprising at least about 5, 10, 15, 20, 25, 50, or 100 contiguous amino acids, or more, including all intermediate lengths, of a polypeptide compositions set forth herein, such as those set forth in SEQ ID NOs:2235 and 2239, or those encoded by a polynucleotide sequence set forth in a sequence of SEQ ID NOs: 1-2234 and 2238.

[0064] In another aspect, the present invention provides variants of the polypeptide compositions described herein. Polypeptide variants generally encompassed by the present invention will typically exhibit at least about 70%, 75%, 80%, 85%, 90%, 91%, 92%, 93%, 94%, 95%, 96%, 97%, 98%, or 99% or more identity (determined as described below), along its length, to a polypeptide sequences set forth herein.

[0065] In one preferred embodiment, the polypeptide fragments and variants provided by the present invention are immunologically reactive with an antibody and/or T-cell that reacts with a full-length polypeptide specifically set forth herein.

[0066] In another preferred embodiment, the polypeptide fragments and variants provided by the present invention exhibit a level of immunogenic activity of at least about 50%, preferably at least about 70%, and most preferably at least about 90% or more of that exhibited by a full-length polypeptide sequence specifically set forth herein.

[0067] A polypeptide “variant,” as the term is used herein, is a polypeptide that typically differs from a polypeptide specifically disclosed herein in one or more substitutions, deletions, additions and/or insertions. Such variants may be naturally occurring or may be synthetically generated, for example, by modifying one or more of the above polypeptide sequences of the invention and evaluating their immunogenic activity as described herein and/or using any of a number of techniques well known in the art.

[0068] For example, certain illustrative variants of the polypeptides of the invention include those in which one or more portions, such as an N-terminal leader sequence or transmembrane domain, have been removed. Other illustrative variants include variants in which a small portion (e.g., 1-30 amino acids, preferably 5-15 amino acids) has been removed from the N- and/or C-terminal of the mature protein.

[0069] In many instances, a variant will contain conservative substitutions. A “conservative substitution” is one in which an amino acid is substituted for another amino acid that has similar properties, such that one skilled in the art of peptide chemistry would expect the secondary structure and hydropathic nature of the polypeptide to be substantially unchanged. As described above, modifications may be made in the structure of the polynucleotides and polypeptides of the present invention and still obtain a functional molecule that encodes a variant or derivative polypeptide with desirable characteristics, e.g., with immunogenic characteristics. When it is desired to alter the amino acid sequence of a polypeptide to create an equivalent, or even an improved, immunogenic variant or portion of a polypeptide of the invention, one skilled in the art will typically change one or more of the codons of the encoding DNA sequence according to Table 1.

[0070] For example, certain amino acids may be substituted for other amino acids in a protein structure without appreciable loss of interactive binding capacity with structures such as, for example, antigen-binding regions of antibodies or binding sites on substrate molecules. Since it is the interactive capacity and nature of a protein that defines that protein's biological functional activity, certain amino acid sequence substitutions can be made in a protein sequence, and, of course, its underlying DNA coding sequence, and nevertheless obtain a protein with like properties. It is thus contemplated that various changes may be made in the peptide sequences of the disclosed compositions, or corresponding DNA sequences which encode said peptides without appreciable loss of their biological utility or activity.

TABLE 1

| Amino Acids | | | Codons | | | | | |
|---|---|---|---|---|---|---|---|---|
| Alanine | Ala | A | GCA | GCC | GCG | GCU | | |
| Cysteine | Cys | C | UGC | UGU | | | | |
| Aspartic acid | Asp | D | GAC | GAU | | | | |
| Glutamic acid | Glu | E | GAA | GAG | | | | |
| Phenylalanine | Phe | F | UUC | UUU | | | | |
| Glycine | Gly | G | GGA | GGC | GGG | GGU | | |
| Histidine | His | H | CAC | CAU | | | | |
| Isoleucine | Ile | I | AUA | AUC | AUU | | | |
| Lysine | Lys | K | AAA | AAG | | | | |
| Leucine | Leu | L | UUA | UUG | CUA | CUC | CUG | CUU |
| Methionine | Met | M | AUG | | | | | |
| Asparagine | Asn | N | AAC | AAU | | | | |
| Proline | Pro | P | CCA | CCC | CCG | CCU | | |
| Glutamine | Gln | Q | CAA | CAG | | | | |
| Arginine | Arg | R | AGA | AGG | CGA | CGC | CGG | CGU |
| Serine | Ser | S | AGC | AGU | UCA | UCC | UCG | UCU |
| Threonine | Thr | T | ACA | ACC | ACG | ACU | | |
| Valine | Val | V | GUA | GUC | GUG | GUU | | |
| Tryptophan | Trp | W | UGG | | | | | |
| Tyrosine | Tyr | Y | UAC | UAU | | | | |

[0071] In making such changes, the hydropathic index of amino acids may be considered. The importance of the hydropathic amino acid index in conferring interactive biologic function on a protein is generally understood in the art (Kyte and Doolittle, 1982, incorporated herein by reference). It is accepted that the relative hydropathic character of the amino acid contributes to the secondary structure of the resultant protein, which in turn defines the interaction of the protein with other molecules, for example, enzymes, substrates, receptors, DNA, antibodies, antigens, and the like. Each amino acid has been assigned a hydropathic index on the basis of its hydrophobicity and charge characteristics (Kyte and Doolittle, 1982). These values are: isoleucine (+4.5); valine (+4.2); leucine (+3.8); phenylalanine (+2.8); cysteine/cystine (+2.5); methionine (+1.9); alanine (+1.8); glycine (−0.4); threonine (−0.7); serine (−0.8); tryptophan (−0.9); tyrosine (−1.3); proline (−1.6); histidine (−3.2); glutamate (−3.5); glutamine (−3.5); aspartate (−3.5); asparagine (−3.5); lysine (−3.9); and arginine (−4.5).

[0072] It is known in the art that certain amino acids may be substituted by other amino acids having a similar hydropathic index or score and still result in a protein with similar biological activity, i.e. still obtain a biological functionally equivalent protein. In making such changes, the substitution of amino acids whose hydropathic indices are within ±2 is preferred, those within ±1 are particularly preferred, and those within ±0.5 are even more particularly preferred. It is also understood in the art that the substitution of like amino acids can be made effectively on the basis of hydrophilicity. U.S. Pat. No. 4,554,101 (specifically incorporated herein by reference in its entirety), states that the greatest local average hydrophilicity of a protein, as governed by the hydrophilicity of its adjacent amino acids, correlates with a biological property of the protein.

[0073] As detailed in U.S. Pat. No. 4,554,101, the following hydrophilicity values have been assigned to amino acid residues: arginine (+3.0); lysine (+3.0); aspartate (+3.0±1); glutamate (+3.0±1); serine (+0.3); asparagine (+0.2); glutamine (+0.2); glycine (0); threonine (−0.4); proline (−0.5±1); alanine (−0.5); histidine (−0.5); cysteine (−1.0); methionine (−1.3); valine (−1.5); leucine (−1.8); isoleucine (−1.8); tyrosine (−2.3); phenylalanine (−2.5); tryptophan (−3.4). It is understood that an amino acid can be substituted for another having a similar hydrophilicity value and still obtain a biologically equivalent, and in particular, an immunologically equivalent protein. In such changes, the substitution of amino acids whose hydrophilicity values are within ±2 is preferred, those within ±1 are particularly preferred, and those within ±0.5 are even more particularly preferred.

[0074] As outlined above, amino acid substitutions are generally therefore based on the relative similarity of the amino acid side-chain substituents, for example, their hydrophobicity, hydrophilicity, charge, size, and the like. Exemplary substitutions that take various of the foregoing characteristics into consideration are well known to those of skill in the art and include: arginine and lysine; glutamate and aspartate; serine and threonine; glutamine and asparagine; and valine, leucine and isoleucine.

[0075] In addition, any polynucleotide may be further modified to increase stability in vivo. Possible modifications include, but are not limited to, the addition of flanking sequences at the 5′ and/or 3′ ends; the use of phosphorothioate or 2′ O-methyl rather than phosphodiesterase linkages in the backbone; and/or the inclusion of nontraditional bases such as inosine, queosine and wybutosine, as well as acetyl- methyl-, thio- and other modified forms of adenine, cytidine, guanine, thymine and uridine.

[0076] Amino acid substitutions may further be made on the basis of similarity in polarity, charge, solubility, hydrophobicity, hydrophilicity and/or the amphipathic nature of the residues. For example, negatively charged amino acids include aspartic acid and glutamic acid; positively charged amino acids include lysine and arginine; and amino acids with uncharged polar head groups having similar hydrophilicity values include leucine, isoleucine and valine; glycine and alanine; asparagine and glutamine; and serine, threonine, phenylalanine and tyrosine. Other groups of amino acids that may represent conservative changes include: (1) ala, pro, gly, glu, asp, gln, asn, ser, thr; (2) cys, ser, tyr, thr; (3) val, ile, leu, met, ala, phe; (4) lys, arg, his; and (5) phe, tyr, trp, his. A variant may also, or alternatively, contain nonconservative changes. In a preferred embodiment, variant polypeptides differ from a native sequence by substitution, deletion or addition of five amino acids or fewer. Variants may also (or alternatively) be modified by, for example, the deletion or addition of amino acids that have minimal influence on the immunogenicity, secondary structure and hydropathic nature of the polypeptide.

[0077] As noted above, polypeptides may comprise a signal (or leader) sequence at the N-terminal end of the protein, which co-translationally or post-translationally directs transfer of the protein. The polypeptide may also be conjugated to a linker or other sequence for ease of synthesis, purification or identification of the polypeptide (e.g., poly-His), or to enhance binding of the polypeptide to a solid support. For example, a polypeptide may be conjugated to an immunoglobulin Fc region.

[0078] When comparing polypeptide sequences, two sequences are said to be “identical” if the sequence of amino acids in the two sequences is the same when aligned for maximum correspondence, as described below. Comparisons between two sequences are typically performed by comparing the sequences over a comparison window to identify and compare local regions of sequence similarity. A “comparison window” as used herein, refers to a segment of at least about 20 contiguous positions, usually 30 to about 75, 40 to about 50, in which a sequence may be compared to a reference sequence of the same number of contiguous positions after the two sequences are optimally aligned.

[0079] Optimal alignment of sequences for comparison may be conducted using the Megalign program in the Lasergene suite of bioinformatics software (DNASTAR, Inc., Madison, Wis.), using default parameters. This program embodies several alignment schemes described in the following references: Dayhoff, M. O. (1978) A model of evolutionary change in proteins—Matrices for detecting distant relationships. In Dayhoff, M. O. (ed.) Atlas of Protein Sequence and Structure, National Biomedical Research Foundation, Washington D.C. Vol. 5, Suppl. 3, pp. 345-358; Hein J. (1990) Unified Approach to Alignment and Phylogenes pp. 626-645 Methods in Enzymology vol. 183, Academic Press, Inc., San Diego, Calif.; Higgins, D. G. and Sharp, P.M. (1989) CABIOS 5:151-153; Myers, E. W. and Muller W. (1988) CABIOS 4:11-17; Robinson, E. D. (1971) Comb. Theor 11:105; Saitou, N. Nei, M. (1987) Mol. Biol. Evol. 4:406-425; Sneath, P. H. A. and Sokal, R. R. (1973) Numerical Taxonomy—the Principles and Practice of Numerical Taxonomy, Freeman Press, San Francisco, Calif.; Wilbur, W. J. and Lipman, D. J. (1983) Proc. Natl. Acad., Sci. USA 80:726-730.

[0080] Alternatively, optimal alignment of sequences for comparison may be conducted by the local identity algorithm of Smith and Waterman (1981) Add. APL. Math 2:482, by the identity alignment algorithm of Needleman and Wunsch (1970) J. Mol. Biol. 48:443, by the search for similarity methods of Pearson and Lipman (1988) Proc. Natl. Acad. Sci. USA 85: 2444, by computerized implementations of these algorithms (GAP, BESTFIT, BLAST, FASTA, and TFASTA in the Wisconsin Genetics Software Package, Genetics Computer Group (GCG), 575 Science Dr., Madison, Wis.), or by inspection.

[0081] One preferred example of algorithms that are suitable for determining percent sequence identity and sequence similarity are the BLAST and BLAST 2.0 algorithms, which are described in Altschul et al. (1977) Nucl. Acids Res. 25:3389-3402 and Altschul et al. (1990) J. Mol. Biol. 215:403-410, respectively. BLAST and BLAST 2.0 can be used, for example with the parameters described herein, to determine percent sequence identity for the polynucleotides and polypeptides of the invention. Software for performing BLAST analyses is publicly available through the National Center for Biotechnology Information. For amino acid sequences, a scoring matrix can be used to calculate the cumulative score. Extension of the word hits in each direction are halted when: the cumulative alignment score falls off by the quantity X from its maximum achieved value; the cumulative score goes to zero or below, due to the accumulation of one or more negative-scoring residue alignments; or the end of either sequence is reached. The BLAST algorithm parameters W, T and X determine the sensitivity and speed of the alignment.

[0082] In one preferred approach, the “percentage of sequence identity” is determined by comparing two optimally aligned sequences over a window of comparison of at least 20 positions, wherein the portion of the polypeptide sequence in the comparison window may comprise additions or deletions (i.e., gaps) of 20 percent or less, usually 5 to 15 percent, or 10 to 12 percent, as compared to the reference sequences (which does not comprise additions or deletions) for optimal alignment of the two sequences. The percentage is calculated by determining the number of positions at which the identical amino acid residue occurs in both sequences to yield the number of matched positions, dividing the number of matched positions by the total number of positions in the reference sequence (i.e., the window size) and multiplying the results by 100 to yield the percentage of sequence identity.

[0083] Within other illustrative embodiments, a polypeptide may be a xenogeneic polypeptide that comprises an polypeptide having substantial sequence identity, as described above, to the human polypeptide (also termed autologous antigen) which served as a reference polypeptide, but which xenogeneic polypeptide is derived from a different, non-human species. One skilled in the art will recognize that “self” antigens are often poor stimulators of CD8+ and CD4+ T-lymphocyte responses, and therefore efficient immunotherapeutic strategies directed against tumor polypeptides require the development of methods to overcome immune tolerance to particular self tumor polypeptides. For example, humans immunized with prostase protein from a xenogeneic (non human) origin are capable of mounting an immune response against the counterpart human protein, e.g. the human prostase tumor protein present on human tumor cells. Accordingly, the present invention provides methods for purifying the xenogeneic form of the tumor proteins set forth herein, such as the polypeptide set forth in SEQ ID NOs:2235 and 2239, or those encoded by polynucleotide sequences set forth in SEQ ID NOs:1-2234 and 2238.

[0084] Therefore, one aspect of the present invention provides xenogeneic variants of the polypeptide compositions described herein. Such xenogeneic variants generally encompassed by the present invention will typically exhibit at least about 70%, 75%, 80%, 85%, 90%, 91%, 92%, 93%, 94%, 95%, 96%, 97%, 98%, or 99% or more identity along their lengths, to a polypeptide sequences set forth herein.

[0085] More particularly, the invention is directed to mouse, rat, monkey, porcine and other non-human polypeptides which can be used as xenogeneic forms of human polypeptides set forth herein, to induce immune responses directed against tumor polypeptides of the invention.

[0086] Within other illustrative embodiments, a polypeptide may be a fusion polypeptide that comprises multiple polypeptides as described herein, or that comprises at least one polypeptide as described herein and an unrelated sequence, such as a known tumor protein. A fusion partner may, for example, assist in providing T helper epitopes (an immunological fusion partner), preferably T helper epitopes recognized by humans, or may assist in expressing the protein (an expression enhancer) at higher yields than the native recombinant protein. Certain preferred fusion partners are both immunological and expression enhancing fusion partners. Other fusion partners may be selected so as to increase the solubility of the polypeptide or to enable the polypeptide to be targeted to desired intracellular compartments. Still further fusion partners include affinity tags, which facilitate purification of the polypeptide.

[0087] Fusion polypeptides may generally be prepared using standard techniques, including chemical conjugation. Preferably, a fusion polypeptide is expressed as a recombinant polypeptide, allowing the production of increased levels, relative to a non-fused polypeptide, in an expression system. Briefly, DNA sequences encoding the polypeptide components may be assembled separately, and ligated into an appropriate expression vector. The 3′ end of the DNA sequence encoding one polypeptide component is ligated, with or without a peptide linker, to the 5′ end of a DNA sequence encoding the second polypeptide component so that the reading frames of the sequences are in phase. This permits translation into a single fusion polypeptide that retains the biological activity of both component polypeptides.

[0088] A peptide linker sequence may be employed to separate the first and second polypeptide components by a distance sufficient to ensure that each polypeptide folds into its secondary and tertiary structures. Such a peptide linker sequence is incorporated into the fusion polypeptide using standard techniques well known in the art. Suitable peptide linker sequences may be chosen based on the following factors: (1) their ability to adopt a flexible extended conformation; (2) their inability to adopt a secondary structure that could interact with functional epitopes on the first and second polypeptides; and (3) the lack of hydrophobic or charged residues that might react with the polypeptide functional epitopes. Preferred peptide linker sequences contain Gly, Asn and Ser residues. Other near neutral amino acids, such as Thr and Ala may also be used in the linker sequence. Amino acid sequences which may be usefully employed as linkers include those disclosed in Maratea et al., Gene 40:39-46, 1985; Murphy et al., Proc. Natl. Acad. Sci. USA 83:8258-8262, 1986; U.S. Pat. No. 4,935,233 and U.S. Pat. No. 4,751,180. The linker sequence may generally be from 1 to about 50 amino acids in length. Linker sequences are not required when the first and second polypeptides have non-essential N-terminal amino acid regions that can be used to separate the functional domains and prevent steric interference.

[0089] The ligated DNA sequences are operably linked to suitable transcriptional or translational regulatory elements. The regulatory elements responsible for expression of DNA are located only 5′ to the DNA sequence encoding the first polypeptides. Similarly, stop codons required to end translation and transcription termination signals are only present 3′ to the DNA sequence encoding the second polypeptide.

[0090] The fusion polypeptide can comprise a polypeptide as described herein together with an unrelated immunogenic protein, such as an immunogenic protein capable of eliciting a recall response. Examples of such proteins include tetanus, tuberculosis and hepatitis proteins (see, for example, Stoute et al. New Engl. J. Med., 336:86-91, 1997).

[0091] In one preferred embodiment, the immunological fusion partner is derived from a Mycobacterium sp., such as a Mycobacterium tuberculosis-derived Ra12 fragment. Ra12 compositions and methods for their use in enhancing the expression and/or immunogenicity of heterologous polynucleotide/polypeptide sequences is described in U.S. Patent Application 60/158,585, the disclosure of which is incorporated herein by reference in its entirety. Briefly, Ra12 refers to a polynucleotide region that is a subsequence of a Mycobacterium tuberculosis MTB32A nucleic acid. MTB32A is a serine protease of 32 KD molecular weight encoded by a gene in virulent and avirulent strains of M. tuberculosis. The nucleotide sequence and amino acid sequence of MTB32A have been described (for example, U.S. Pat. Application No. 60/158,585; see also, Skeiky et al., Infection and Immun. (1999) 67:3998-4007, incorporated herein by reference). C-terminal fragments of the MTB32A coding sequence express at high levels and remain as a soluble polypeptides throughout the purification process. Moreover, Ra12 may enhance the immunogenicity of heterologous immunogenic polypeptides with which it is fused. One preferred Ra12 fusion polypeptide comprises a 14 KD C-terminal fragment corresponding to amino acid residues 192 to 323 of MTB32A. Other preferred Ra12 polynucleotides generally comprise at least about 15 consecutive nucleotides, at least about 30 nucleotides, at least about 60 nucleotides, at least about 100 nucleotides, at least about 200 nucleotides, or at least about 300 nucleotides that encode a portion of a Ra12 polypeptide. Ra12 polynucleotides may comprise a native sequence (i.e., an endogenous sequence that encodes a Ra12 polypeptide or a portion thereof) or may comprise a variant of such a sequence. Ra12 polynucleotide variants may contain one or more substitutions, additions, deletions and/or insertions such that the biological activity of the encoded fusion polypeptide is not substantially diminished, relative to a fusion polypeptide comprising a native Ra12 polypeptide. Variants preferably exhibit at least about 70% identity, more preferably at least about 80% identity and most preferably at least about 90% identity to a polynucleotide sequence that encodes a native Ra12 polypeptide or a portion thereof.

[0092] Within other preferred embodiments, an immunological fusion partner is derived from protein D, a surface protein of the gram-negative bacterium Haemophilus influenza B (WO 91/18926). Preferably, a protein D derivative comprises approximately the first third of the protein (e.g., the first N-terminal 100-110 amino acids), and a protein D derivative may be lipidated. Within certain preferred embodiments, the first 109 residues of a Lipoprotein D fusion partner is included on the N-terminus to provide the polypeptide with additional exogenous T-cell epitopes and to increase the expression level in E. coli (thus functioning as an expression enhancer). The lipid tail ensures optimal presentation of the antigen to antigen presenting cells. Other fusion partners include the non-structural protein from influenzae virus, NS1 (hemaglutinin). Typically, the N-terminal 81 amino acids are used, although different fragments that include T-helper epitopes may be used.

[0093] In another embodiment, the immunological fusion partner is the protein known as LYTA, or a portion thereof (preferably a C-terminal portion). LYTA is derived from Streptococcus pneumoniae, which synthesizes an N-acetyl-L-alanine amidase known as amidase LYTA (encoded by the LytA gene; Gene 43:265-292, 1986). LYTA is an autolysin that specifically degrades certain bonds in the peptidoglycan backbone. The C-terminal domain of the LYTA protein is responsible for the affinity to the choline or to some choline analogues such as DEAE. This property has been exploited for the development of E. coli C-LYTA expressing plasmids useful for expression of fusion proteins. Purification of hybrid proteins containing the C-LYTA fragment at the amino terminus has been described (see Biotechnology 10:795-798, 1992). Within a preferred embodiment, a repeat portion of LYTA may be incorporated into a fusion polypeptide. A repeat portion is found in the C-terminal region starting at residue 178. A particularly preferred repeat portion incorporates residues 188-305.

[0094] Yet another illustrative embodiment involves fusion polypeptides, and the polynucleotides encoding them, wherein the fusion partner comprises a targeting signal capable of directing a polypeptide to the endosomal/lysosomal compartment, as described in U.S. Pat. No. 5,633,234. An immunogenic polypeptide of the invention, when fused with this targeting signal, will associate more efficiently with MHC class II molecules and thereby provide enhanced in vivo stimulation of CD4⁺ T-cells specific for the polypeptide.

[0095] Polypeptides of the invention are prepared using any of a variety of well known synthetic and/or recombinant techniques, the latter of which are further described below. Polypeptides, portions and other variants generally less than about 150 amino acids can be generated by synthetic means, using techniques well known to those of ordinary skill in the art. In one illustrative example, such polypeptides are synthesized using any of the commercially available solid-phase techniques, such as the Merrifield solid-phase synthesis method, where amino acids are sequentially added to a growing amino acid chain. See Merrifield, J. Am. Chem. Soc. 85:2149-2146, 1963. Equipment for automated synthesis of polypeptides is commercially available from suppliers such as Perkin Elmer/Applied BioSystems Division (Foster City, Calif.), and may be operated according to the manufacturer's instructions.

[0096] In general, polypeptide compositions (including fusion polypeptides) of the invention are isolated. An “isolated” polypeptide is one that is removed from its original environment. For example, a naturally-occurring protein or polypeptide is isolated if it is separated from some or all of the coexisting materials in the natural system. Preferably, such polypeptides are also purified, e.g., are at least about 90% pure, more preferably at least about 95% pure and most preferably at least about 99% pure.

[0097] Polynucleotide Compositions

[0098] The present invention, in other aspects, provides polynucleotide compositions. The terms “DNA” and “polynucleotide” are used essentially interchangeably herein to refer to a DNA molecule that has been isolated free of total genomic DNA of a particular species. “Isolated,” as used herein, means that a polynucleotide is substantially away from other coding sequences, and that the DNA molecule does not contain large portions of unrelated coding DNA, such as large chromosomal fragments or other functional genes or polypeptide coding regions. Of course, this refers to the DNA molecule as originally isolated, and does not exclude genes or coding regions later added to the segment by the hand of man.

[0099] As will be understood by those skilled in the art, the polynucleotide compositions of this invention can include genomic sequences, extra-genomic and plasmid-encoded sequences and smaller engineered gene segments that express, or may be adapted to express, proteins, polypeptides, peptides and the like. Such segments may be naturally isolated, or modified synthetically by the hand of man.

[0100] As will be also recognized by the skilled artisan, polynucleotides of the invention may be single-stranded (coding or antisense) or double-stranded, and may be DNA (genomic, cDNA or synthetic) or RNA molecules. RNA molecules may include HnRNA molecules, which contain introns and correspond to a DNA molecule in a one-to-one manner, and mRNA molecules, which do not contain introns. Additional coding or non-coding sequences may, but need not, be present within a polynucleotide of the present invention, and a polynucleotide may, but need not, be linked to other molecules and/or support materials.

[0101] Polynucleotides may comprise a native sequence (i.e., an endogenous sequence that encodes a polypeptide/protein of the invention or a portion thereof) or may comprise a sequence that encodes a variant or derivative, preferably and immunogenic variant or derivative, of such a sequence.

[0102] Therefore, according to another aspect of the present invention, polynucleotide compositions are provided that comprise some or all of a polynucleotide sequence set forth in any one of SEQ ID NOs:1-2234 and 2238, complements of a polynucleotide sequence set forth in any one of SEQ ID NOs:1-2234 and 2238, and degenerate variants of a polynucleotide sequence set forth in any one of SEQ ID NO:1-2234 and 2238. In certain preferred embodiments, the polynucleotide sequences set forth herein encode immunogenic polypeptides, as described above.

[0103] In other related embodiments, the present invention provides polynucleotide variants having substantial identity to the sequences disclosed herein in SEQ ID NOs:1-2234 and 2238, for example those comprising at least 70% sequence identity, preferably at least 75%, 80%, 85%, 90%, 95%, 96%, 97%, 98%, or 99% or higher, sequence identity compared to a polynucleotide sequence of this invention using the methods described herein, (e.g., BLAST analysis using standard parameters, as described below). One skilled in this art will recognize that these values can be appropriately adjusted to determine corresponding identity of proteins encoded by two nucleotide sequences by taking into account codon degeneracy, amino acid similarity, reading frame positioning and the like.

[0104] Typically, polynucleotide variants will contain one or more substitutions, additions, deletions and/or insertions, preferably such that the immunogenicity of the polypeptide encoded by the variant polynucleotide is not substantially diminished relative to a polypeptide encoded by a polynucleotide sequence specifically set forth herein). The term “variants” should also be understood to encompasses homologous genes of xenogeneic origin.

[0105] In additional embodiments, the present invention provides polynucleotide fragments comprising or consisting of various lengths of contiguous stretches of sequence identical to or complementary to one or more of the sequences disclosed herein. For example, polynucleotides are provided by this invention that comprise or consist of at least about 10, 15, 20, 30, 40, 50, 75, 100, 150, 200, 300, 400, 500 or 1000 or more contiguous nucleotides of one or more of the sequences disclosed herein as well as all intermediate lengths there between. It will be readily understood that “intermediate lengths”, in this context, means any length between the quoted values, such as 16, 17, 18, 19, etc.; 21, 22, 23, etc.; 30, 31, 32, etc.; 50, 51, 52, 53, etc.; 100, 101, 102, 103, etc.; 150, 151, 152, 153, etc.; including all integers through 200-500; 500-1,000, and the like. A polynucleotide sequence as described here may be extended at one or both ends by additional nucleotides not found in the native sequence. This additional sequence may consist of 1, 2, 3, 4, 5, 6, 7, 8, 9, 10, 11, 12, 13, 14, 15, 16, 17, 18, 19, or 20 nucleotides at either end of the disclosed sequence or at both ends of the disclosed sequence.

[0106] In another embodiment of the invention, polynucleotide compositions are provided that are capable of hybridizing under moderate to high stringency conditions to a polynucleotide sequence provided herein, or a fragment thereof, or a complementary sequence thereof. Hybridization techniques are well known in the art of molecular biology. For purposes of illustration, suitable moderately stringent conditions for testing the hybridization of a polynucleotide of this invention with other polynucleotides include prewashing in a solution of 5× SSC, 0.5% SDS, 1.0 mM EDTA (pH 8.0); hybridizing at 50° C.-60° C., 5× SSC, overnight; followed by washing twice at 65° C. for 20 minutes with each of 2×, 0.5× and 0.2× SSC containing 0.1% SDS. One skilled in the art will understand that the stringency of hybridization can be readily manipulated, such as by altering the salt content of the hybridization solution and/or the temperature at which the hybridization is performed. For example, in another embodiment, suitable highly stringent hybridization conditions include those described above, with the exception that the temperature of hybridization is increased, e.g., to 60-65° C. or 65-70° C.

[0107] In certain preferred embodiments, the polynucleotides described above, e.g., polynucleotide variants, fragments and hybridizing sequences, encode polypeptides that are immunologically cross-reactive with a polypeptide sequence specifically set forth herein. In other preferred embodiments, such polynucleotides encode polypeptides that have a level of immunogenic activity of at least about 50%, preferably at least about 70%, and more preferably at least about 90% of that for a polypeptide sequence specifically set forth herein.

[0108] The polynucleotides of the present invention, or fragments thereof, regardless of the length of the coding sequence itself, may be combined with other DNA sequences, such as promoters, polyadenylation signals, additional restriction enzyme sites, multiple cloning sites, other coding segments, and the like, such that their overall length may vary considerably. It is therefore contemplated that a nucleic acid fragment of almost any length may be employed, with the total length preferably being limited by the ease of preparation and use in the intended recombinant DNA protocol. For example, illustrative polynucleotide segments with total lengths of about 10,000, about 5000, about 3000, about 2,000, about 1,000, about 500, about 200, about 100, about 50 base pairs in length, and the like, (including all intermediate lengths) are contemplated to be useful in many implementations of this invention.

[0109] When comparing polynucleotide sequences, two sequences are said to be “identical” if the sequence of nucleotides in the two sequences is the same when aligned for maximum correspondence, as described below. Comparisons between two sequences are typically performed by comparing the sequences over a comparison window to identify and compare local regions of sequence similarity. A “comparison window” as used herein, refers to a segment of at least about 20 contiguous positions, usually 30 to about 75, 40 to about 50, in which a sequence may be compared to a reference sequence of the same number of contiguous positions after the two sequences are optimally aligned.

[0110] Optimal alignment of sequences for comparison may be conducted using the Megalign program in the Lasergene suite of bioinformatics software (DNASTAR, Inc., Madison, Wis.), using default parameters. This program embodies several alignment schemes described in the following references: Dayhoff, M. O. (1978) A model of evolutionary change in proteins-Matrices for detecting distant relationships. In Dayhoff, M. O. (ed.) Atlas of Protein Sequence and Structure, National Biomedical Research Foundation, Washington D.C. Vol. 5, Suppl. 3, pp. 345-358; Hein J. (1990) Unified Approach to Alignment and Phylogenes pp. 626-645 Methods in Enzymology vol. 183, Academic Press, Inc., San Diego, Calif.; Higgins, D. G. and Sharp, P.M. (1989) CABIOS 5:151-153; Myers, E. W. and Muller W. (1988) CABIOS 4:11-17; Robinson, E. D. (1971) Comb. Theor 11:105; Santou, N. Nes, M. (1987) Mol. Biol. Evol. 4:406-425; Sneath, P. H. A. and Sokal, R. R. (1973) Numerical Taxonomy—the Principles and Practice of Numerical Taxonomy, Freeman Press, San Francisco, Calif.; Wilbur, W. J. and Lipman, D. J. (1983) Proc. Natl. Acad., Sci. USA 80:726-730.

[0111] Alternatively, optimal alignment of sequences for comparison may be conducted by the local identity algorithm of Smith and Waterman (1981) Add. APL. Math 2:482, by the identity alignment algorithm of Needleman and Wunsch (1970) J. Mol. Biol. 48:443, by the search for similarity methods of Pearson and Lipman (1988) Proc. Natl. Acad. Sci. USA 85: 2444, by computerized implementations of these algorithms (GAP, BESTFIT, BLAST, FASTA, and TFASTA in the Wisconsin Genetics Software Package, Genetics Computer Group (GCG), 575 Science Dr., Madison, Wis.), or by inspection.

[0112] One preferred example of algorithms that are suitable for determining percent sequence identity and sequence similarity are the BLAST and BLAST 2.0 algorithms, which are described in Altschul et al. (1977) Nucl. Acids Res. 25:3389-3402 and Altschul et al. (1990) J. Mol. Biol. 215:403-410, respectively. BLAST and BLAST 2.0 can be used, for example with the parameters described herein, to determine percent sequence identity for the polynucleotides of the invention. Software for performing BLAST analyses is publicly available through the National Center for Biotechnology Information. In one illustrative example, cumulative scores can be calculated using, for nucleotide sequences, the parameters M (reward score for a pair of matching residues; always >0) and N (penalty score for mismatching residues; always <0). Extension of the word hits in each direction are halted when: the cumulative alignment score falls off by the quantity X from its maximum achieved value; the cumulative score goes to zero or below, due to the accumulation of one or more negative-scoring residue alignments; or the end of either sequence is reached. The BLAST algorithm parameters W, T and X determine the sensitivity and speed of the alignment. The BLASTN program (for nucleotide sequences) uses as defaults a wordlength (W) of 11, and expectation (E) of 10, and the BLOSUM62 scoring matrix (see Henikoff and Henikoff (1989) Proc. Natl. Acad. Sci. USA 89:10915) alignments, (B) of 50, expectation (E) of 10, M=5, N=−4 and a comparison of both strands.

[0113] Preferably, the “percentage of sequence identity” is determined by comparing two optimally aligned sequences over a window of comparison of at least 20 positions, wherein the portion of the polynucleotide sequence in the comparison window may comprise additions or deletions (i.e., gaps) of 20 percent or less, usually 5 to 15 percent, or 10 to 12 percent, as compared to the reference sequences (which does not comprise additions or deletions) for optimal alignment of the two sequences. The percentage is calculated by determining the number of positions at which the identical nucleic acid bases occurs in both sequences to yield the number of matched positions, dividing the number of matched positions by the total number of positions in the reference sequence (i.e., the window size) and multiplying the results by 100 to yield the percentage of sequence identity.

[0114] It will be appreciated by those of ordinary skill in the art that, as a result of the degeneracy of the genetic code, there are many nucleotide sequences that encode a polypeptide as described herein. Some of these polynucleotides bear minimal homology to the nucleotide sequence of any native gene. Nonetheless, polynucleotides that vary due to differences in codon usage are specifically contemplated by the present invention. Further, alleles of the genes comprising the polynucleotide sequences provided herein are within the scope of the present invention. Alleles are endogenous genes that are altered as a result of one or more mutations, such as deletions, additions and/or substitutions of nucleotides. The resulting mRNA and protein may, but need not, have an altered structure or function. Alleles may be identified using standard techniques (such as hybridization, amplification and/or database sequence comparison).

[0115] Therefore, in another embodiment of the invention, a mutagenesis approach, such as site-specific mutagenesis, is employed for the preparation of immunogenic variants and/or derivatives of the polypeptides described herein. By this approach, specific modifications in a polypeptide sequence can be made through mutagenesis of the underlying polynucleotides that encode them. These techniques provides a straightforward approach to prepare and test sequence variants, for example, incorporating one or more of the foregoing considerations, by introducing one or more nucleotide sequence changes into the polynucleotide.

[0116] Site-specific mutagenesis allows the production of mutants through the use of specific oligonucleotide sequences which encode the DNA sequence of the desired mutation, as well as a sufficient number of adjacent nucleotides, to provide a primer sequence of sufficient size and sequence complexity to form a stable duplex on both sides of the deletion junction being traversed. Mutations may be employed in a selected polynucleotide sequence to improve, alter, decrease, modify, or otherwise change the properties of the polynucleotide itself, and/or alter the properties, activity, composition, stability, or primary sequence of the encoded polypeptide.

[0117] In certain embodiments of the present invention, the inventors contemplate the mutagenesis of the disclosed polynucleotide sequences to alter one or more properties of the encoded polypeptide, such as the immunogenicity of a polypeptide vaccine. The techniques of site-specific mutagenesis are well-known in the art, and are widely used to create variants of both polypeptides and polynucleotides. For example, site-specific mutagenesis is often used to alter a specific portion of a DNA molecule. In such embodiments, a primer comprising typically about 14 to about 25 nucleotides or so in length is employed, with about 5 to about 10 residues on both sides of the junction of the sequence being altered.

[0118] As will be appreciated by those of skill in the art, site-specific mutagenesis techniques have often employed a phage vector that exists in both a single stranded and double stranded form. Typical vectors useful in site-directed mutagenesis include vectors such as the M13 phage. These phage are readily commercially-available and their use is generally well-known to those skilled in the art. Double-stranded plasmids are also routinely employed in site directed mutagenesis that eliminates the step of transferring the gene of interest from a plasmid to a phage.

[0119] In general, site-directed mutagenesis in accordance herewith is performed by first obtaining a single-stranded vector or melting apart of two strands of a double-stranded vector that includes within its sequence a DNA sequence that encodes the desired peptide. An oligonucleotide primer bearing the desired mutated sequence is prepared, generally synthetically. This primer is then annealed with the single-stranded vector, and subjected to DNA polymerizing enzymes such as E. coli polymerase I Klenow fragment, in order to complete the synthesis of the mutation-bearing strand. Thus, a heteroduplex is formed wherein one strand encodes the original non-mutated sequence and the second strand bears the desired mutation. This heteroduplex vector is then used to transform appropriate cells, such as E. coli cells, and clones are selected which include recombinant vectors bearing the mutated sequence arrangement.

[0120] The preparation of sequence variants of the selected peptide-encoding DNA segments using site-directed mutagenesis provides a means of producing potentially useful species and is not meant to be limiting as there are other ways in which sequence variants of peptides and the DNA sequences encoding them may be obtained. For example, recombinant vectors encoding the desired peptide sequence may be treated with mutagenic agents, such as hydroxylamine, to obtain sequence variants. Specific details regarding these methods and protocols are found in the teachings of Maloy et al., 1994; Segal, 1976; Prokop and Bajpai, 1991; Kuby, 1994; and Maniatis et al., 1982, each incorporated herein by reference, for that purpose.

[0121] As used herein, the term “oligonucleotide directed mutagenesis procedure” refers to template-dependent processes and vector-mediated propagation which result in an increase in the concentration of a specific nucleic acid molecule relative to its initial concentration, or in an increase in the concentration of a detectable signal, such as amplification. As used herein, the term “oligonucleotide directed mutagenesis procedure” is intended to refer to a process that involves the template-dependent extension of a primer molecule. The term template dependent process refers to nucleic acid synthesis of an RNA or a DNA molecule wherein the sequence of the newly synthesized strand of nucleic acid is dictated by the well-known rules of complementary base pairing (see, for example, Watson, 1987). Typically, vector mediated methodologies involve the introduction of the nucleic acid fragment into a DNA or RNA vector, the clonal amplification of the vector, and the recovery of the amplified nucleic acid fragment. Examples of such methodologies are provided by U.S. Pat. No. 4,237,224, specifically incorporated herein by reference in its entirety.

[0122] In another approach for the production of polypeptide variants of the present invention, recursive sequence recombination, as described in U.S. Pat. No. 5,837,458, may be employed. In this approach, iterative cycles of recombination and screening or selection are performed to “evolve” individual polynucleotide variants of the invention having, for example, enhanced immunogenic activity.

[0123] In other embodiments of the present invention, the polynucleotide sequences provided herein can be advantageously used as probes or primers for nucleic acid hybridization. As such, it is contemplated that nucleic acid segments that comprise or consist of a sequence region of at least about a 15 nucleotide long contiguous sequence that has the same sequence as, or is complementary to, a 15 nucleotide long contiguous sequence disclosed herein will find particular utility. Longer contiguous identical or complementary sequences, e.g., those of about 20, 30, 40, 50, 100, 200, 500, 1000 (including all intermediate lengths) and even up to full length sequences will also be of use in certain embodiments.

[0124] The ability of such nucleic acid probes to specifically hybridize to a sequence of interest will enable them to be of use in detecting the presence of complementary sequences in a given sample. However, other uses are also envisioned, such as the use of the sequence information for the preparation of mutant species primers, or primers for use in preparing other genetic constructions.

[0125] Polynucleotide molecules having sequence regions consisting of contiguous nucleotide stretches of 10-14, 15-20, 30, 50, or even of 100-200 nucleotides or so (including intermediate lengths as well), identical or complementary to a polynucleotide sequence disclosed herein, are particularly contemplated as hybridization probes for use in, e.g., Southern and Northern blotting. This would allow a gene product, or fragment thereof, to be analyzed, both in diverse cell types and also in various bacterial cells. The total size of fragment, as well as the size of the complementary stretch(es), will ultimately depend on the intended use or application of the particular nucleic acid segment. Smaller fragments will generally find use in hybridization embodiments, wherein the length of the contiguous complementary region may be varied, such as between about 15 and about 100 nucleotides, but larger contiguous complementarity stretches may be used, according to the length complementary sequences one wishes to detect.

[0126] The use of a hybridization probe of about 15-25 nucleotides in length allows the formation of a duplex molecule that is both stable and selective. Molecules having contiguous complementary sequences over stretches greater than 15 bases in length are generally preferred, though, in order to increase stability and selectivity of the hybrid, and thereby improve the quality and degree of specific hybrid molecules obtained. One will generally prefer to design nucleic acid molecules having gene-complementary stretches of 15 to 25 contiguous nucleotides, or even longer where desired.

[0127] Hybridization probes may be selected from any portion of any of the sequences disclosed herein. All that is required is to review the sequences set forth herein, or to any continuous portion of the sequences, from about 15-25 nucleotides in length up to and including the full length sequence, that one wishes to utilize as a probe or primer. The choice of probe and primer sequences may be governed by various factors. For example, one may wish to employ primers from towards the termini of the total sequence.

[0128] Small polynucleotide segments or fragments may be readily prepared by, for example, directly synthesizing the fragment by chemical means, as is commonly practiced using an automated oligonucleotide synthesizer. Also, fragments may be obtained by application of nucleic acid reproduction technology, such as the PCR™ technology of U.S. Pat. No. 4,683,202 (incorporated herein by reference), by introducing selected sequences into recombinant vectors for recombinant production, and by other recombinant DNA techniques generally known to those of skill in the art of molecular biology.

[0129] The nucleotide sequences of the invention may be used for their ability to selectively form duplex molecules with complementary stretches of the entire gene or gene fragments of interest. Depending on the application envisioned, one will typically desire to employ varying conditions of hybridization to achieve varying degrees of selectivity of probe towards target sequence. For applications requiring high selectivity, one will typically desire to employ relatively stringent conditions to form the hybrids, e.g., one will select relatively low salt and/or high temperature conditions, such as provided by a salt concentration of from about 0.02 M to about 0.15 M salt at temperatures of from about 50° C. to about 70° C. Such selective conditions tolerate little, if any, mismatch between the probe and the template or target strand, and would be particularly suitable for isolating related sequences.

[0130] Of course, for some applications, for example, where one desires to prepare mutants employing a mutant primer strand hybridized to an underlying template, less stringent (reduced stringency) hybridization conditions will typically be needed in order to allow formation of the heteroduplex. In these circumstances, one may desire to employ salt conditions such as those of from about 0.15 M to about 0.9 M salt, at temperatures ranging from about 20° C. to about 55° C. Cross-hybridizing species can thereby be readily identified as positively hybridizing signals with respect to control hybridizations. In any case, it is generally appreciated that conditions can be rendered more stringent by the addition of increasing amounts of formamide, which serves to destabilize the hybrid duplex in the same manner as increased temperature. Thus, hybridization conditions can be readily manipulated, and thus will generally be a method of choice depending on the desired results.

[0131] According to another embodiment of the present invention, polynucleotide compositions comprising antisense oligonucleotides are provided. Antisense oligonucleotides have been demonstrated to be effective and targeted inhibitors of protein synthesis, and, consequently, provide a therapeutic approach by which a disease can be treated by inhibiting the synthesis of proteins that contribute to the disease. The efficacy of antisense oligonucleotides for inhibiting protein synthesis is well established. For example, the synthesis of polygalactauronase and the muscarine type 2 acetylcholine receptor are inhibited by antisense oligonucleotides directed to their respective mRNA sequences (U.S. Pat. No. 5,739,119 and U.S. Pat. No. 5,759,829). Further, examples of antisense inhibition have been demonstrated with the nuclear protein cyclin, the multiple drug resistance gene (MDG1), ICAM-1, E-selectin, STK-1, striatal GABA_{A} receptor and human EGF (Jaskulski et al., Science. Jun. 10, 1988;240(4858):1544-6; Vasanthakumar and Ahmed, Cancer Commun. 1989;1(4):225-32; Peris et al., Brain Res Mol Brain Res. Jun. 15, 1998;57(2):310-20; U.S. Pat. Nos. 5,801,154; 5,789,573; 5,718,709 and 5,610,288). Antisense constructs have also been described that inhibit and can be used to treat a variety of abnormal cellular proliferations, e.g. cancer (U.S. Pat. No. 5,747,470; 5,591,317 and 5,783,683).

[0132] Therefore, in certain embodiments, the present invention provides oligonucleotide sequences that comprise all, or a portion of, any sequence that is capable of specifically binding to polynucleotide sequence described herein, or a complement thereof. In one embodiment, the antisense oligonucleotides comprise DNA or derivatives thereof. In another embodiment, the oligonucleotides comprise RNA or derivatives thereof. In a third embodiment, the oligonucleotides are modified DNAs comprising a phosphorothioated modified backbone. In a fourth embodiment, the oligonucleotide sequences comprise peptide nucleic acids or derivatives thereof. In each case, preferred compositions comprise a sequence region that is complementary, and more preferably substantially-complementary, and even more preferably, completely complementary to one or more portions of polynucleotides disclosed herein. Selection of antisense compositions specific for a given gene sequence is based upon analysis of the chosen target sequence and determination of secondary structure, Tₘ, binding energy, and relative stability. Antisense compositions may be selected based upon their relative inability to form dimers, hairpins, or other secondary structures that would reduce or prohibit specific binding to the target mRNA in a host cell. Highly preferred target regions of the mRNA, are those which are at or near the AUG translation initiation codon, and those sequences which are substantially complementary to 5′ regions of the mRNA. These secondary structure analyses and target site selection considerations can be performed, for example, using v.4 of the OLIGO primer analysis software and/or the BLASTN 2.0.5 algorithm software (Altschul et al., Nucleic Acids Res. 1997, 25(17):3389-402).

[0133] The use of an antisense delivery method employing a short peptide vector, termed MPG (27 residues), is also contemplated. The MPG peptide contains a hydrophobic domain derived from the fusion sequence of HIV gp41 and a hydrophilic domain from the nuclear localization sequence of SV40 T-antigen (Morris et al., Nucleic Acids Res. Jul. 15, 1997;25(14):2730-6). It has been demonstrated that several molecules of the MPG peptide coat the antisense oligonucleotides and can be delivered into cultured mammalian cells in less than 1 hour with relatively high efficiency (90%). Further, the interaction with MPG strongly increases both the stability of the oligonucleotide to nuclease and the ability to cross the plasma membrane.

[0134] According to another embodiment of the invention, the polynucleotide compositions described herein are used in the design and preparation of ribozyme molecules for inhibiting expression of the tumor polypeptides and proteins of the present invention in tumor cells. Ribozymes are RNA-protein complexes that cleave nucleic acids in a site-specific fashion. Ribozymes have specific catalytic domains that possess endonuclease activity (Kim and Cech, Proc Natl Acad Sci U S A. 1987 December; 84(24):8788-92; Forster and Symons, Cell. Apr. 24, 1987;49(2):211-20). For example, a large number of ribozymes accelerate phosphoester transfer reactions with a high degree of specificity, often cleaving only one of several phosphoesters in an oligonucleotide substrate (Cech et al., Cell. Dec. 27, 1981(3 Pt 2):487-96; Michel and Westhof, J Mol Biol. Dec. 5, 1990;216(3):585-610; Reinhold-Hurek and Shub, Nature. 1992 May 14;357(6374):173-6). This specificity has been attributed to the requirement that the substrate bind via specific base-pairing interactions to the internal guide sequence (“IGS”) of the ribozyme prior to chemical reaction.

[0135] Six basic varieties of naturally-occurring enzymatic RNAs are known presently. Each can catalyze the hydrolysis of RNA phosphodiester bonds in trans (and thus can cleave other RNA molecules) under physiological conditions. In general, enzymatic nucleic acids act by first binding to a target RNA. Such binding occurs through the target binding portion of a enzymatic nucleic acid which is held in close proximity to an enzymatic portion of the molecule that acts to cleave the target RNA. Thus, the enzymatic nucleic acid first recognizes and then binds a target RNA through complementary base-pairing, and once bound to the correct site, acts enzymatically to cut the target RNA. Strategic cleavage of such a target RNA will destroy its ability to direct synthesis of an encoded protein. After an enzymatic nucleic acid has bound and cleaved its RNA target, it is released from that RNA to search for another target and can repeatedly bind and cleave new targets.

[0136] The enzymatic nature of a ribozyme is advantageous over many technologies, such as antisense technology (where a nucleic acid molecule simply binds to a nucleic acid target to block its translation) since the concentration of ribozyme necessary to affect a therapeutic treatment is lower than that of an antisense oligonucleotide. This advantage reflects the ability of the ribozyme to act enzymatically. Thus, a single ribozyme molecule is able to cleave many molecules of target RNA. In addition, the ribozyme is a highly specific inhibitor, with the specificity of inhibition depending not only on the base pairing mechanism of binding to the target RNA, but also on the mechanism of target RNA cleavage. Single mismatches, or base-substitutions, near the site of cleavage can completely eliminate catalytic activity of a ribozyme. Similar mismatches in antisense molecules do not prevent their action (Woolf et al., Proc Natl Acad Sci U S A. Aug. 15, 1992;89(16):7305-9). Thus, the specificity of action of a ribozyme is greater than that of an antisense oligonucleotide binding the same RNA site.

[0137] The enzymatic nucleic acid molecule may be formed in a hammerhead, hairpin, a hepatitis 6 virus, group I intron or RNaseP RNA (in association with an RNA guide sequence) or Neurospora VS RNA motif. Examples of hammerhead motifs are described by Rossi etal. Nucleic Acids Res. Sep. 11, 1992;20(17):4559-65. Examples of hairpin motifs are described by Hampel et al. (Eur. Pat. Appl. Publ. No. EP 0360257), Hampel and Tritz, Biochemistry Jun. 13, 1989;28(12):4929-33; Hampel et al, Nucleic Acids Res. Jan. 25, 1990;18(2):299-304 and U.S. Pat. No. 5,631,359. An example of the hepatitis 6 virus motif is described by Perrotta and Been, Biochemistry. Dec. 1, 1992;31(47):11843-52; an example of the RNaseP motif is described by Guerrier-Takada et al., Cell. 1983 December;35(3 Pt 2):849-57; Neurospora VS RNA ribozyme motif is described by Collins (Saville and Collins, Cell. May 18, 1990;61(4):685-96; Saville and Collins, Proc Natl Acad Sci U S A. Oct. 1, 1991;88(19):8826-30; Collins and Olive, Biochemistry. Mar. 23, 1993;32(11):2795-9); and an example of the Group I intron is described in (U.S. Pat. No. 4,987,071). All that is important in an enzymatic nucleic acid molecule of this invention is that it has a specific substrate binding site which is complementary to one or more of the target gene RNA regions, and that it have nucleotide sequences within or surrounding that substrate binding site which impart an RNA cleaving activity to the molecule. Thus the ribozyme constructs need not be limited to specific motifs mentioned herein.

[0138] Ribozymes may be designed as described in Int. Pat. Appl. Publ. No. WO 93/23569 and Int. Pat. Appl. Publ. No. WO 94/02595, each specifically incorporated herein by reference) and synthesized to be tested in vitro and in vivo, as described. Such ribozymes can also be optimized for delivery. While specific examples are provided, those in the art will recognize that equivalent RNA targets in other species can be utilized when necessary.

[0139] Ribozyme activity can be optimized by altering the length of the ribozyme binding arms, or chemically synthesizing ribozymes with modifications that prevent their degradation by serum ribonucleases (see e.g., Int. Pat. Appl. Publ. No. WO 92/07065; Int. Pat. Appl. Publ. No. WO 93/15187; Int. Pat. Appl. Publ. No. WO 91/03162; Eur. Pat. Appl. Publ. No. 92110298.4; U.S. Pat. No. 5,334,711; and Int. Pat. Appl. Publ. No. WO 94/13688, which describe various chemical modifications that can be made to the sugar moieties of enzymatic RNA molecules), modifications which enhance their efficacy in cells, and removal of stem II bases to shorten RNA synthesis times and reduce chemical requirements.

[0140] Sullivan et al. (Int. Pat. Appl. Publ. No. WO 94/02595) describes the general methods for delivery of enzymatic RNA molecules. Ribozymes may be administered to cells by a variety of methods known to those familiar to the art, including, but not restricted to, encapsulation in liposomes, by iontophoresis, or by incorporation into other vehicles, such as hydrogels, cyclodextrins, biodegradable nanocapsules, and bioadhesive microspheres. For some indications, ribozymes may be directly delivered ex vivo to cells or tissues with or without the aforementioned vehicles. Alternatively, the RNA/vehicle combination may be locally delivered by direct inhalation, by direct injection or by use of a catheter, infusion pump or stent. Other routes of delivery include, but are not limited to, intravascular, intramuscular, subcutaneous or joint injection, aerosol inhalation, oral (tablet or pill form), topical, systemic, ocular, intraperitoneal and/or intrathecal delivery. More detailed descriptions of ribozyme delivery and administration are provided in Int. Pat. Appl. Publ. No. WO 94/02595 and Int. Pat. Appl. Publ. No. WO 93/23569, each specifically incorporated herein by reference.

[0141] Another means of accumulating high concentrations of a ribozyme(s) within cells is to incorporate the ribozyme-encoding sequences into a DNA expression vector. Transcription of the ribozyme sequences are driven from a promoter for eukaryotic RNA polymerase I (pol I), RNA polymerase II (pol II), or RNA polymerase III (pol III). Transcripts from pol II or pol III promoters will be expressed at high levels in all cells; the levels of a given pol II promoter in a given cell type will depend on the nature of the gene regulatory sequences (enhancers, silencers, etc.) present nearby. Prokaryotic RNA polymerase promoters may also be used, providing that the prokaryotic RNA polymerase enzyme is expressed in the appropriate cells Ribozymes expressed from such promoters have been shown to function in mammalian cells. Such transcription units can be incorporated into a variety of vectors for introduction into mammalian cells, including but not restricted to, plasmid DNA vectors, viral DNA vectors (such as adenovirus or adeno-associated vectors), or viral RNA vectors (such as retroviral, semliki forest virus, sindbis virus vectors).

[0142] In another embodiment of the invention, peptide nucleic acids (PNAs) compositions are provided. PNA is a DNA mimic in which the nucleobases are attached to a pseudopeptide backbone (Good and Nielsen, Antisense Nucleic Acid Drug Dev. 1997 7(4) 431-37). PNA is able to be utilized in a number methods that traditionally have used RNA or DNA. Often PNA sequences perform better in techniques than the corresponding RNA or DNA sequences and have utilities that are not inherent to RNA or DNA. A review of PNA including methods of making, characteristics of, and methods of using, is provided by Corey (Trends Biotechnol Jun. 15, 1997(6):224-9). As such, in certain embodiments, one may prepare PNA sequences that are complementary to one or more portions of the ACE mRNA sequence, and such PNA compositions may be used to regulate, alter, decrease, or reduce the translation of ACE-specific mRNA, and thereby alter the level of ACE activity in a host cell to which such PNA compositions have been administered.

[0143] PNAs have 2-aminoethyl-glycine linkages replacing the normal phosphodiester backbone of DNA (Nielsen et al, Science Dec. 6, 1991;254(5037):1497-500; Hanvey et al., Science. Nov. 27, 1992;258(5087):1481-5; Hyrup and Nielsen, Bioorg Med Chem. Jan. 4, 1996(1):5-23). This chemistry has three important consequences: firstly, in contrast to DNA or phosphorothioate oligonucleotides, PNAs are neutral molecules; secondly, PNAs are achiral, which avoids the need to develop a stereoselective synthesis; and thirdly, PNA synthesis uses standard Boc or Fmoc protocols for solid-phase peptide synthesis, although other methods, including a modified Merrifield method, have been used.

[0144] PNA monomers or ready-made oligomers are commercially available from PerSeptive Biosystems (Framingham, Mass.). PNA syntheses by either Boc or Fmoc protocols are straightforward using manual or automated protocols (Norton et al., Bioorg Med Chem. Apr. 3, 1995(4):437-45). The manual protocol lends itself to the production of chemically modified PNAs or the simultaneous synthesis of families of closely related PNAs.

[0145] As with peptide synthesis, the success of a particular PNA synthesis will depend on the properties of the chosen sequence. For example, while in theory PNAs can incorporate any combination of nucleotide bases, the presence of adjacent purines can lead to deletions of one or more residues in the product. In expectation of this difficulty, it is suggested that, in producing PNAs with adjacent purines, one should repeat the coupling of residues likely to be added inefficiently. This should be followed by the purification of PNAs by reverse-phase high-pressure liquid chromatography, providing yields and purity of product similar to those observed during the synthesis of peptides.

[0146] Modifications of PNAs for a given application may be accomplished by coupling amino acids during solid-phase synthesis or by attaching compounds that contain a carboxylic acid group to the exposed N-terminal amine. Alternatively, PNAs can be modified after synthesis by coupling to an introduced lysine or cysteine. The ease with which PNAs can be modified facilitates optimization for better solubility or for specific functional requirements. Once synthesized, the identity of PNAs and their derivatives can be confirmed by mass spectrometry. Several studies have made and utilized modifications of PNAs (for example, Norton et al., Bioorg Med Chem. Apr. 3, 1995(4):437-45; Petersen et al., J Pept Sci. May-Jun. 1, 1995(3):175-83; Orum et al., Biotechniques. Sep. 19, 1995(3):472-80; Footer et al., Biochemistry. Aug. 20, 1996;35(33):10673-9; Griffith et al., Nucleic Acids Res. Aug. 11, 1995;23(15):3003-8; Pardridge et al., Proc Natl Acad Sci U S A. Jun. 6, 1995;92(12):5592-6; Boffa et al., Proc Natl Acad Sci U S A. Mar. 14, 1995;92(6):1901-5; Gambacorti-Passerini et al., Blood. Aug. 15, 1996;88(4):1411-7; Armitage et al., Proc Natl Acad Sci U S A. Nov. 11, 1997;94(23):12320-5; Seeger et al., Biotechniques. Sep. 23, 1997(3):512-7). U.S. Pat. No. 5,700,922 discusses PNA-DNA-PNA chimeric molecules and their uses in diagnostics, modulating protein in organisms, and treatment of conditions susceptible to therapeutics.

[0147] Methods of characterizing the antisense binding properties of PNAs are discussed in Rose (Anal Chem. Dec. 15, 1993;65(24):3545-9) and Jensen et al. (Biochemistry. Apr. 22, 1997;36(16):5072-7). Rose uses capillary gel electrophoresis to determine binding of PNAs to their complementary oligonucleotide, measuring the relative binding kinetics and stoichiometry. Similar types of measurements were made by Jensen et al. using BIAcore™ technology.

[0148] Other applications of PNAs that have been described and will be apparent to the skilled artisan include use in DNA strand invasion, antisense inhibition, mutational analysis, enhancers of transcription, nucleic acid purification, isolation of transcriptionally active genes, blocking of transcription factor binding, genome cleavage, biosensors, in situ hybridization, and the like.

[0149] Polynucleotide Identification, Characterization and Expression

[0150] Polynucleotides compositions of the present invention may be identified, prepared and/or manipulated using any of a variety of well established techniques (see generally, Sambrook et al., Molecular Cloning: A Laboratory Manual, Cold Spring Harbor Laboratories, Cold Spring Harbor, N.Y., 1989, and other like references). For example, a polynucleotide may be identified, as described in more detail below, by screening a microarray of cDNAs for tumor-associated expression (i.e., expression that is at least two fold greater in a tumor than in normal tissue, as determined using a representative assay provided herein). Such screens may be performed, for example, using the microarray technology of Affymetrix, Inc. (Santa Clara, Calif.) according to the manufacturer's instructions (and essentially as described by Schena et al., Proc. Natl. Acad. Sci. USA 93:10614-10619, 1996 and Heller et al., Proc. Natl. Acad. Sci. USA 94:2150-2155, 1997). Alternatively, polynucleotides may be amplified from cDNA prepared from cells expressing the proteins described herein, such as tumor cells.

[0151] Many template dependent processes are available to amplify a target sequences of interest present in a sample. One of the best known amplification methods is the polymerase chain reaction (PCR™) which is described in detail in U.S. Pat. Nos. 4,683,195, 4,683,202 and 4,800,159, each of which is incorporated herein by reference in its entirety. Briefly, in PCR™, two primer sequences are prepared which are complementary to regions on opposite complementary strands of the target sequence. An excess of deoxynucleoside triphosphates is added to a reaction mixture along with a DNA polymerase (e.g., Taq polymerase). If the target sequence is present in a sample, the primers will bind to the target and the polymerase will cause the primers to be extended along the target sequence by adding on nucleotides. By raising and lowering the temperature of the reaction mixture, the extended primers will dissociate from the target to form reaction products, excess primers will bind to the target and to the reaction product and the process is repeated. Preferably reverse transcription and PCR™ amplification procedure may be performed in order to quantify the amount of mRNA amplified. Polymerase chain reaction methodologies are well known in the art.

[0152] Any of a number of other template dependent processes, many of which are variations of the PCR™ amplification technique, are readily known and available in the art. Illustratively, some such methods include the ligase chain reaction (referred to as LCR), described, for example, in Eur. Pat. Appl. Publ. No. 320,308 and U.S. Pat. No. 4,883,750; Qbeta Replicase, described in PCT Intl. Pat. Appl. Publ. No. PCT/US87/00880; Strand Displacement Amplification (SDA) and Repair Chain Reaction (RCR). Still other amplification methods are described in Great Britain Pat. Appl. No. 2 202 328, and in PCT Intl. Pat. Appl. Publ. No. PCT/US89/01025. Other nucleic acid amplification procedures include transcription-based amplification systems (TAS) (PCT Intl. Pat. Appl. Publ. No. WO 88/10315), including nucleic acid sequence based amplification (NASBA) and 3SR. Eur. Pat. Appl. Publ. No. 329,822 describes a nucleic acid amplification process involving cyclically synthesizing single-stranded RNA (“ssRNA”), ssDNA, and double-stranded DNA (dsDNA). PCT Intl. Pat. Appl. Publ. No. WO 89/06700 describes a nucleic acid sequence amplification scheme based on the hybridization of a promoter/primer sequence to a target single-stranded DNA (“ssDNA”) followed by transcription of many RNA copies of the sequence. Other amplification methods such as “RACE” (Frohman, 1990), and “one-sided PCR” (Ohara, 1989) are also well-known to those of skill in the art.

[0153] An amplified portion of a polynucleotide of the present invention may be used to isolate a full length gene from a suitable library (e.g., a tumor cDNA library) using well known techniques. Within such techniques, a library (cDNA or genomic) is screened using one or more polynucleotide probes or primers suitable for amplification. Preferably, a library is size-selected to include larger molecules. Random primed libraries may also be preferred for identifying 5′ and upstream regions of genes. Genomic libraries are preferred for obtaining introns and extending 5′ sequences.

[0154] For hybridization techniques, a partial sequence may be labeled (e.g., by nick-translation or end-labeling with ³²P) using well-known techniques. A bacterial or bacteriophage library is then generally screened by hybridizing filters containing denatured bacterial colonies (or lawns containing phage plaques) with the labeled probe (see Sambrook et al., Molecular Cloning: A Laboratory Manual, Cold Spring Harbor Laboratories, Cold Spring Harbor, N.Y., 1989). Hybridizing colonies or plaques are selected and expanded, and the DNA is isolated for further analysis. cDNA clones may be analyzed to determine the amount of additional sequence by, for example, PCR using a primer from the partial sequence and a primer from the vector. Restriction maps and partial sequences may be generated to identify one or more overlapping clones. The complete sequence may then be determined using standard techniques, which may involve generating a series of deletion clones. The resulting overlapping sequences can then assembled into a single contiguous sequence. A full length cDNA molecule can be generated by ligating suitable fragments, using well known techniques.

[0155] Alternatively, amplification techniques, such as those described above, can be useful for obtaining a full length coding sequence from a partial cDNA sequence. One such amplification technique is inverse PCR (see Triglia et al., Nucl. Acids Res. 16:8186, 1988), which uses restriction enzymes to generate a fragment in the known region of the gene. The fragment is then circularized by intramolecular ligation and used as a template for PCR with divergent primers derived from the known region. Within an alternative approach, sequences adjacent to a partial sequence may be retrieved by amplification with a primer to a linker sequence and a primer specific to a known region. The amplified sequences are typically subjected to a second round of amplification with the same linker primer and a second primer specific to the known region. A variation on this procedure, which employs two primers that initiate extension in opposite directions from the known sequence, is described in WO 96/38591. Another such technique is known as “rapid amplification of cDNA ends” or RACE. This technique involves the use of an internal primer and an external primer, which hybridizes to a polyA region or vector sequence, to identify sequences that are 5′ and 3′ of a known sequence. Additional techniques include capture PCR (Lagerstrom et al., PCR Methods Applic. 1:111-19, 1991) and walking PCR (Parker et al., Nucl. Acids. Res. 19:3055-60, 1991). Other methods employing amplification may also be employed to obtain a full length cDNA sequence.

[0156] In certain instances, it is possible to obtain a full length cDNA sequence by analysis of sequences provided in an expressed sequence tag (EST) database, such as that available from GenBank. Searches for overlapping ESTs may generally be performed using well known programs (e.g., NCBI BLAST searches), and such ESTs may be used to generate a contiguous full length sequence. Full length DNA sequences may also be obtained by analysis of genomic fragments.

[0157] In other embodiments of the invention, polynucleotide sequences or fragments thereof which encode polypeptides of the invention, or fusion proteins or functional equivalents thereof, may be used in recombinant DNA molecules to direct expression of a polypeptide in appropriate host cells. Due to the inherent degeneracy of the genetic code, other DNA sequences that encode substantially the same or a functionally equivalent amino acid sequence may be produced and these sequences may be used to clone and express a given polypeptide.

[0158] As will be understood by those of skill in the art, it may be advantageous in some instances to produce polypeptide-encoding nucleotide sequences possessing non-naturally occurring codons. For example, codons preferred by a particular prokaryotic or eukaryotic host can be selected to increase the rate of protein expression or to produce a recombinant RNA transcript having desirable properties, such as a half-life which is longer than that of a transcript generated from the naturally occurring sequence.

[0159] Moreover, the polynucleotide sequences of the present invention can be engineered using methods generally known in the art in order to alter polypeptide encoding sequences for a variety of reasons, including but not limited to, alterations which modify the cloning, processing, and/or expression of the gene product. For example, DNA shuffling by random fragmentation and PCR reassembly of gene fragments and synthetic oligonucleotides may be used to engineer the nucleotide sequences. In addition, site-directed mutagenesis may be used to insert new restriction sites, alter glycosylation patterns, change codon preference, produce splice variants, or introduce mutations, and so forth.

[0160] In another embodiment of the invention, natural, modified, or recombinant nucleic acid sequences may be ligated to a heterologous sequence to encode a fusion protein. For example, to screen peptide libraries for inhibitors of polypeptide activity, it may be useful to encode a chimeric protein that can be recognized by a commercially available antibody. A fusion protein may also be engineered to contain a cleavage site located between the polypeptide-encoding sequence and the heterologous protein sequence, so that the polypeptide may be cleaved and purified away from the heterologous moiety.

[0161] Sequences encoding a desired polypeptide may be synthesized, in whole or in part, using chemical methods well known in the art (see Caruthers, M. H. et al. (1980) Nucl. Acids Res. Symp. Ser. 215-223, Horn, T. et al. (1980) Nucl. Acids Res. Symp. Ser. 225-232). Alternatively, the protein itself may be produced using chemical methods to synthesize the amino acid sequence of a polypeptide, or a portion thereof. For example, peptide synthesis can be performed using various solid-phase techniques (Roberge, J. Y. et al. (1995) Science 269:202-204) and automated synthesis may be achieved, for example, using the ABI 431A Peptide Synthesizer (Perkin Elmer, Palo Alto, Calif.).

[0162] A newly synthesized peptide may be substantially purified by preparative high performance liquid chromatography (e.g., Creighton, T. (1983) Proteins, Structures and Molecular Principles, WH Freeman and Co., New York, N.Y.) or other comparable techniques available in the art. The composition of the synthetic peptides may be confirmed by amino acid analysis or sequencing (e.g., the Edman degradation procedure). Additionally, the amino acid sequence of a polypeptide, or any part thereof, may be altered during direct synthesis and/or combined using chemical methods with sequences from other proteins, or any part thereof, to produce a variant polypeptide.

[0163] In order to express a desired polypeptide, the nucleotide sequences encoding the polypeptide, or functional equivalents, may be inserted into appropriate expression vector, i.e., a vector which contains the necessary elements for the transcription and translation of the inserted coding sequence. Methods which are well known to those skilled in the art may be used to construct expression vectors containing sequences encoding a polypeptide of interest and appropriate transcriptional and translational control elements. These methods include in vitro recombinant DNA techniques, synthetic techniques, and in vivo genetic recombination. Such techniques are described, for example, in Sambrook, J. et al. (1989) Molecular Cloning, A Laboratory Manual, Cold Spring Harbor Press, Plainview, N.Y., and Ausubel, F. M. et al. (1989) Current Protocols in Molecular Biology, John Wiley & Sons, New York. N.Y.

[0164] A variety of expression vector/host systems may be utilized to contain and express polynucleotide sequences. These include, but are not limited to, microorganisms such as bacteria transformed with recombinant bacteriophage, plasmid, or cosmid DNA expression vectors; yeast transformed with yeast expression vectors; insect cell systems infected with virus expression vectors (e.g., baculovirus); plant cell systems transformed with virus expression vectors (e.g., cauliflower mosaic virus, CaMV; tobacco mosaic virus, TMV) or with bacterial expression vectors (e.g., Ti or pBR322 plasmids); or animal cell systems.

[0165] The “control elements” or “regulatory sequences” present in an expression vector are those non-translated regions of the vector—enhancers, promoters, 5′ and 3′ untranslated regions—which interact with host cellular proteins to carry out transcription and translation. Such elements may vary in their strength and specificity. Depending on the vector system and host utilized, any number of suitable transcription and translation elements, including constitutive and inducible promoters, may be used. For example, when cloning in bacterial systems, inducible promoters such as the hybrid lacZ promoter of the pBLUESCRIPT phagemid (Stratagene, La Jolla, Calif.) or pSPORT1 plasmid (Gibco BRL, Gaithersburg, Md.) and the like may be used. In mammalian cell systems, promoters from mammalian genes or from mammalian viruses are generally preferred. If it is necessary to generate a cell line that contains multiple copies of the sequence encoding a polypeptide, vectors based on SV40 or EBV may be advantageously used with an appropriate selectable marker.

[0166] In bacterial systems, any of a number of expression vectors may be selected depending upon the use intended for the expressed polypeptide. For example, when large quantities are needed, for example for the induction of antibodies, vectors which direct high level expression of fusion proteins that are readily purified may be used. Such vectors include, but are not limited to, the multifunctional E. coli cloning and expression vectors such as pBLUESCRIPT (Stratagene), in which the sequence encoding the polypeptide of interest may be ligated into the vector in frame with sequences for the amino-terminal Met and the subsequent 7 residues of .beta.-galactosidase so that a hybrid protein is produced; pIN vectors (Van Heeke, G. and S. M. Schuster (1989) J Biol. Chem. 264:5503-5509); and the like. pGEX Vectors (Promega, Madison, Wis.) may also be used to express foreign polypeptides as fusion proteins with glutathione S-transferase (GST). In general, such fusion proteins are soluble and can easily be purified from lysed cells by adsorption to glutathione-agarose beads followed by elution in the presence of free glutathione. Proteins made in such systems may be designed to include heparin, thrombin, or factor XA protease cleavage sites so that the cloned polypeptide of interest can be released from the GST moiety at will.

[0167] In the yeast, Saccharomyces cerevisiae, a number of vectors containing constitutive or inducible promoters such as alpha factor, alcohol oxidase, and PGH may be used. For reviews, see Ausubel et al. (supra) and Grant et al. (1987) Methods Enzymol. 153:516-544.

[0168] In cases where plant expression vectors are used, the expression of sequences encoding polypeptides may be driven by any of a number of promoters. For example, viral promoters such as the 35S and 19S promoters of CaMV may be used alone or in combination with the omega leader sequence from TMV (Takamatsu, N. (1987) EMBO J. 6:307-311. Alternatively, plant promoters such as the small subunit of RUBISCO or heat shock promoters may be used (Coruzzi, G. et al. (1984) EMBO J. 3:1671-1680; Broglie, R. et al. (1984) Science 224:838-843; and Winter, J. et al. (1991) Results Probl. Cell Differ. 17:85-105). These constructs can be introduced into plant cells by direct DNA transformation or pathogen-mediated transfection. Such techniques are described in a number of generally available reviews (see, for example, Hobbs, S. or Murry, L. E. in McGraw Hill Yearbook of Science and Technology (1992) McGraw Hill, New York, N.Y.; pp. 191-196).

[0169] An insect system may also be used to express a polypeptide of interest. For example, in one such system, Autographa califormica nuclear polyhedrosis virus (AcNPV) is used as a vector to express foreign genes in Spodoptera frugiperda cells or in Trichoplusia larvae. The sequences encoding the polypeptide may be cloned into a non-essential region of the virus, such as the polyhedrin gene, and placed under control of the polyhedrin promoter. Successful insertion of the polypeptide-encoding sequence will render the polyhedrin gene inactive and produce recombinant virus lacking coat protein. The recombinant viruses may then be used to infect, for example, S. frugiperda cells or Trichoplusia larvae in which the polypeptide of interest may be expressed (Engelhard, E. K. et al. (1994) Proc. Natl. Acad. Sci. 91:3224-3227).

[0170] In mammalian host cells, a number of viral-based expression systems are generally available. For example, in cases where an adenovirus is used as an expression vector, sequences encoding a polypeptide of interest may be ligated into an adenovirus transcription/translation complex consisting of the late promoter and tripartite leader sequence. Insertion in a non-essential E1 or E3 region of the viral genome may be used to obtain a viable virus which is capable of expressing the polypeptide in infected host cells (Logan, J. and Shenk, T. (1984) Proc. Natl. Acad. Sci. 81:3655-3659). In addition, transcription enhancers, such as the Rous sarcoma virus (RSV) enhancer, may be used to increase expression in mammalian host cells.

[0171] Specific initiation signals may also be used to achieve more efficient translation of sequences encoding a polypeptide of interest. Such signals include the ATG initiation codon and adjacent sequences. In cases where sequences encoding the polypeptide, its initiation codon, and upstream sequences are inserted into the appropriate expression vector, no additional transcriptional or translational control signals may be needed. However, in cases where only coding sequence, or a portion thereof, is inserted, exogenous translational control signals including the ATG initiation codon should be provided. Furthermore, the initiation codon should be in the correct reading frame to ensure translation of the entire insert. Exogenous translational elements and initiation codons may be of various origins, both natural and synthetic. The efficiency of expression may be enhanced by the inclusion of enhancers which are appropriate for the particular cell system which is used, such as those described in the literature (Scharf, D. et al. (1994) Results Probl. Cell Differ. 20:125-162).

[0172] In addition, a host cell strain may be chosen for its ability to modulate the expression of the inserted sequences or to process the expressed protein in the desired fashion. Such modifications of the polypeptide include, but are not limited to, acetylation, carboxylation. glycosylation, phosphorylation, lipidation, and acylation. Post-translational processing which cleaves a “prepro” form of the protein may also be used to facilitate correct insertion, folding and/or function. Different host cells such as CHO, COS, HeLa, MDCK, HEK293, and WI38, which have specific cellular machinery and characteristic mechanisms for such post-translational activities, may be chosen to ensure the correct modification and processing of the foreign protein.

[0173] For long-term, high-yield production of recombinant proteins, stable expression is generally preferred. For example, cell lines which stably express a polynucleotide of interest may be transformed using expression vectors which may contain viral origins of replication and/or endogenous expression elements and a selectable marker gene on the same or on a separate vector. Following the introduction of the vector, cells may be allowed to grow for 1-2 days in an enriched media before they are switched to selective media. The purpose of the selectable marker is to confer resistance to selection, and its presence allows growth and recovery of cells which successfully express the introduced sequences. Resistant clones of stably transformed cells may be proliferated using tissue culture techniques appropriate to the cell type.

[0174] Any number of selection systems may be used to recover transformed cell lines. These include, but are not limited to, the herpes simplex virus thymidine kinase (Wigler, M. et al. (1977) Cell 11:223-32) and adenine phosphoribosyltransferase (Lowy, I. et al. (1990) Cell 22:817-23) genes which can be employed in tk.sup.- or aprt.sup.-cells, respectively. Also, antimetabolite, antibiotic or herbicide resistance can be used as the basis for selection; for example, dhfr which confers resistance to methotrexate (Wigler, M. et al. (1980) Proc. Natl. Acad. Sci. 77:3567-70); npt, which confers resistance to the aminoglycosides, neomycin and G-418 (Colbere-Garapin, F. et al (1981) J. Mol. Biol. 150:1-14); and als or pat, which confer resistance to chlorsulfuron and phosphinotricin acetyltransferase, respectively (Murry, supra). Additional selectable genes have been described, for example, trpB, which allows cells to utilize indole in place of tryptophan, or hisD, which allows cells to utilize histinol in place of histidine (Hartman, S. C. and R. C. Mulligan (1988) Proc. Natl. Acad. Sci. 85:8047-51). The use of visible markers has gained popularity with such markers as anthocyanins, beta-glucuronidase and its substrate GUS, and luciferase and its substrate luciferin, being widely used not only to identify transformants, but also to quantify the amount of transient or stable protein expression attributable to a specific vector system (Rhodes, C. A. et al. (1995) Methods Mol. Biol. 55:121-131).

[0175] Although the presence/absence of marker gene expression suggests that the gene of interest is also present, its presence and expression may need to be confirmed. For example, if the sequence encoding a polypeptide is inserted within a marker gene sequence, recombinant cells containing sequences can be identified by the absence of marker gene function. Alternatively, a marker gene can be placed in tandem with a polypeptide-encoding sequence under the control of a single promoter. Expression of the marker gene in response to induction or selection usually indicates expression of the tandem gene as well.

[0176] Alternatively, host cells that contain and express a desired polynucleotide sequence may be identified by a variety of procedures known to those of skill in the art. These procedures include, but are not limited to, DNA-DNA or DNA-RNA hybridizations and protein bioassay or immunoassay techniques which include, for example, membrane, solution, or chip based technologies for the detection and/or quantification of nucleic acid or protein.

[0177] A variety of protocols for detecting and measuring the expression of polynucleotide-encoded products, using either polyclonal or monoclonal antibodies specific for the product are known in the art. Examples include enzyme-linked immunosorbent assay (ELISA), radioimmunoassay (RIA), and fluorescence activated cell sorting (FACS). A two-site, monoclonal-based immunoassay utilizing monoclonal antibodies reactive to two non-interfering epitopes on a given polypeptide may be preferred for some applications, but a competitive binding assay may also be employed. These and other assays are described, among other places, in Hampton, R. et al. (1990; Serological Methods, a Laboratory Manual, APS Press, St Paul. Minn.) and Maddox, D. E. et al. (1983; J. Exp. Med. 158:1211-1216).

[0178] A wide variety of labels and conjugation techniques are known by those skilled in the art and may be used in various nucleic acid and amino acid assays. Means for producing labeled hybridization or PCR probes for detecting sequences related to polynucleotides include oligolabeling, nick translation, end-labeling or PCR amplification using a labeled nucleotide. Alternatively, the sequences, or any portions thereof may be cloned into a vector for the production of an mRNA probe. Such vectors are known in the art, are commercially available, and may be used to synthesize RNA probes in vitro by addition of an appropriate RNA polymerase such as T7, T3, or SP6 and labeled nucleotides. These procedures may be conducted using a variety of commercially available kits. Suitable reporter molecules or labels, which may be used include radionuclides, enzymes, fluorescent, chemiluminescent, or chromogenic agents as well as substrates, cofactors, inhibitors, magnetic particles, and the like.

[0179] Host cells transformed with a polynucleotide sequence of interest may be cultured under conditions suitable for the expression and recovery of the protein from cell culture. The protein produced by a recombinant cell may be secreted or contained intracellularly depending on the sequence and/or the vector used. As will be understood by those of skill in the art, expression vectors containing polynucleotides of the invention may be designed to contain signal sequences which direct secretion of the encoded polypeptide through a prokaryotic or eukaryotic cell membrane. Other recombinant constructions may be used to join sequences encoding a polypeptide of interest to nucleotide sequence encoding a polypeptide domain which will facilitate purification of soluble proteins. Such purification facilitating domains include, but are not limited to, metal chelating peptides such as histidine-tryptophan modules that allow purification on immobilized metals, protein A domains that allow purification on immobilized immunoglobulin, and the domain utilized in the FLAGS extension/affinity purification system (Immunex Corp., Seattle, Wash.). The inclusion of cleavable linker sequences such as those specific for Factor XA or enterokinase (Invitrogen. San Diego, Calif.) between the purification domain and the encoded polypeptide may be used to facilitate purification. One such expression vector provides for expression of a fusion protein containing a polypeptide of interest and a nucleic acid encoding 6 histidine residues preceding a thioredoxin or an enterokinase cleavage site. The histidine residues facilitate purification on IMIAC (immobilized metal ion affinity chromatography) as described in Porath, J. et al. (1992, Prot. Exp. Purif. 3:263-281) while the enterokinase cleavage site provides a means for purifying the desired polypeptide from the fusion protein. A discussion of vectors which contain fusion proteins is provided in Kroll, D. J. et al. (1993; DNA Cell Biol. 12:441-453).

[0180] In addition to recombinant production methods, polypeptides of the invention, and fragments thereof, may be produced by direct peptide synthesis using solid-phase techniques (Merrifield J. (1963) J Am. Chem. Soc. 85:2149-2154). Protein synthesis may be performed using manual techniques or by automation. Automated synthesis may be achieved, for example, using Applied Biosystems 431A Peptide Synthesizer (Perkin Elmer). Alternatively, various fragments may be chemically synthesized separately and combined using chemical methods to produce the full length molecule.

[0181] Antibody Compositions, Fragments Thereof and other Binding Agents

[0182] According to another aspect, the present invention further provides binding agents, such as antibodies and antigen-binding fragments thereof, that exhibit immunological binding to a tumor polypeptide disclosed herein, or to a portion, variant or derivative thereof. An antibody, or antigen-binding fragment thereof, is said to “specifically bind,” “immunogically bind,” and/or is “immunologically reactive” to a polypeptide of the invention if it reacts at a detectable level (within, for example, an ELISA assay) with the polypeptide, and does not react detectably with unrelated polypeptides under similar conditions.

[0183] Immunological binding, as used in this context, generally refers to the non-covalent interactions of the type which occur between an immunoglobulin molecule and an antigen for which the immunoglobulin is specific. The strength, or affinity of immunological binding interactions can be expressed in terms of the dissociation constant (K_{d}) of the interaction, wherein a smaller K_{d} represents a greater affinity. Immunological binding properties of selected polypeptides can be quantified using methods well known in the art. One such method entails measuring the rates of antigen-binding site/antigen complex formation and dissociation, wherein those rates depend on the concentrations of the complex partners, the affinity of the interaction, and on geometric parameters that equally influence the rate in both directions. Thus, both the “on rate constant” (Kₒₙ) and the “off rate constant” (K_{off}) can be determined by calculation of the concentrations and the actual rates of association and dissociation. The ratio of K_{off}/Kₒₙ enables cancellation of all parameters not related to affinity, and is thus equal to the dissociation constant K_{d}. See, generally, Davies et al. (1990) Annual Rev. Biochem. 59:439-473.

[0184] An “antigen-binding site,” or “binding portion” of an antibody refers to the part of the immunoglobulin molecule that participates in antigen binding. The antigen binding site is formed by amino acid residues of the N-terminal variable (“V”) regions of the heavy (“H”) and light (“L”) chains. Three highly divergent stretches within the V regions of the heavy and light chains are referred to as “hypervariable regions” which are interposed between more conserved flanking stretches known as “framework regions,” or “FRs”. Thus the term “FR” refers to amino acid sequences which are naturally found between and adjacent to hypervariable regions in immunoglobulins. In an antibody molecule, the three hypervariable regions of a light chain and the three hypervariable regions of a heavy chain are disposed relative to each other in three dimensional space to form an antigen-binding surface. The antigen-binding surface is complementary to the three-dimensional surface of a bound antigen, and the three hypervariable regions of each of the heavy and light chains are referred to as “complementarity-determining regions,” or “CDRs.”

[0185] Binding agents may be further capable of differentiating between patients with and without a cancer, such as colon cancer, using the representative assays provided herein. For example, antibodies or other binding agents that bind to a tumor protein will preferably generate a signal indicating the presence of a cancer in at least about 20% of patients with the disease, more preferably at least about 30% of patients. Alternatively, or in addition, the antibody will generate a negative signal indicating the absence of the disease in at least about 90% of individuals without the cancer. To determine whether a binding agent satisfies this requirement, biological samples (e.g., blood, sera, sputum, urine and/or tumor biopsies) from patients with and without a cancer (as determined using standard clinical tests) may be assayed as described herein for the presence of polypeptides that bind to the binding agent. Preferably, a statistically significant number of samples with and without the disease will be assayed. Each binding agent should satisfy the above criteria; however, those of ordinary skill in the art will recognize that binding agents may be used in combination to improve sensitivity.

[0186] Any agent that satisfies the above requirements may be a binding agent. For example, a binding agent may be a ribosome, with or without a peptide component, an RNA molecule or a polypeptide. In a preferred embodiment, a binding agent is an antibody or an antigen-binding fragment thereof. Antibodies may be prepared by any of a variety of techniques known to those of ordinary skill in the art. See, e.g., Harlow and Lane, Antibodies: A Laboratory Manual, Cold Spring Harbor Laboratory, 1988. In general, antibodies can be produced by cell culture techniques, including the generation of monoclonal antibodies as described herein, or via transfection of antibody genes into suitable bacterial or mammalian cell hosts, in order to allow for the production of recombinant antibodies. In one technique, an immunogen comprising the polypeptide is initially injected into any of a wide variety of mammals (e.g., mice, rats, rabbits, sheep or goats). In this step, the polypeptides of this invention may serve as the immunogen without modification. Alternatively, particularly for relatively short polypeptides, a superior immune response may be elicited if the polypeptide is joined to a carrier protein, such as bovine serum albumin or keyhole limpet hemocyanin. The immunogen is injected into the animal host, preferably according to a predetermined schedule incorporating one or more booster immunizations, and the animals are bled periodically. Polyclonal antibodies specific for the polypeptide may then be purified from such antisera by, for example, affinity chromatography using the polypeptide coupled to a suitable solid support.

[0187] Monoclonal antibodies specific for an antigenic polypeptide of interest may be prepared, for example, using the technique of Kohler and Milstein, Eur. J. Immunol. 6:511-519, 1976, and improvements thereto. Briefly, these methods involve the preparation of immortal cell lines capable of producing antibodies having the desired specificity (i.e., reactivity with the polypeptide of interest). Such cell lines may be produced, for example, from spleen cells obtained from an animal immunized as described above. The spleen cells are then immortalized by, for example, fusion with a myeloma cell fusion partner, preferably one that is syngeneic with the immunized animal. A variety of fusion techniques may be employed. For example, the spleen cells and myeloma cells may be combined with a nonionic detergent for a few minutes and then plated at low density on a selective medium that supports the growth of hybrid cells, but not myeloma cells. A preferred selection technique uses HAT (hypoxanthine, aminopterin, thymidine) selection. After a sufficient time, usually about 1 to 2 weeks, colonies of hybrids are observed. Single colonies are selected and their culture supernatants tested for binding activity against the polypeptide. Hybridomas having high reactivity and specificity are preferred.

[0188] Monoclonal antibodies may be isolated from the supernatants of growing hybridoma colonies. In addition, various techniques may be employed to enhance the yield, such as injection of the hybridoma cell line into the peritoneal cavity of a suitable vertebrate host, such as a mouse. Monoclonal antibodies may then be harvested from the ascites fluid or the blood. Contaminants may be removed from the antibodies by conventional techniques, such as chromatography, gel filtration, precipitation, and extraction. The polypeptides of this invention may be used in the purification process in, for example, an affinity chromatography step.

[0189] A number of therapeutically useful molecules are known in the art which comprise antigen-binding sites that are capable of exhibiting immunological binding properties of an antibody molecule. The proteolytic enzyme papain preferentially cleaves IgG molecules to yield several fragments, two of which (the “F(ab)” fragments) each comprise a covalent heterodimer that includes an intact antigen-binding site. The enzyme pepsin is able to cleave IgG molecules to provide several fragments, including the “F(ab′)₂” fragment which comprises both antigen-binding sites. An “Fv” fragment can be produced by preferential proteolytic cleavage of an IgM, and on rare occasions IgG or IgA immunoglobulin molecule. Fv fragments are, however, more commonly derived using recombinant techniques known in the art. The Fv fragment includes a non-covalent V_{H}::V_{L} heterodimer including an antigen-binding site which retains much of the antigen recognition and binding capabilities of the native antibody molecule. Inbar et al. (1972) Proc. Nat. Acad. Sci. USA 69:2659-2662; Hochman et al. (1976) Biochem 15:2706-2710; and Ehrlich et al. (1980) Biochem 19:4091-4096.

[0190] A single chain Fv (“sFv”) polypeptide is a covalently linked V_{H}::V_{L} heterodimer which is expressed from a gene fusion including V_{H}- and V_{L}-encoding genes linked by a peptide-encoding linker. Huston et al. (1988) Proc. Nat. Acad. Sci. USA 85(16):5879-5883. A number of methods have been described to discern chemical structures for converting the naturally aggregated—but chemically separated—light and heavy polypeptide chains from an antibody V region into an sFv molecule which will fold into a three dimensional structure substantially similar to the structure of an antigen-binding site. See, e.g., U.S. Pat. Nos. 5,091,513 and 5,132,405, to Huston et al.; and U.S. Pat. No. 4,946,778, to Ladner et al.

[0191] Each of the above-described molecules includes a heavy chain and a light chain CDR set, respectively interposed between a heavy chain and a light chain FR set which provide support to the CDRS and define the spatial relationship of the CDRs relative to each other. As used herein, the term “CDR set” refers to the three hypervariable regions of a heavy or light chain V region. Proceeding from the N-terminus of a heavy or light chain, these regions are denoted as “CDR1,” “CDR2,” and “CDR3” respectively. An antigen-binding site, therefore, includes six CDRs, comprising the CDR set from each of a heavy and a light chain V region. A polypeptide comprising a single CDR, (e.g., a CDR1, CDR2 or CDR3) is referred to herein as a “molecular recognition unit.” Crystallographic analysis of a number of antigen-antibody complexes has demonstrated that the amino acid residues of CDRs form extensive contact with bound antigen, wherein the most extensive antigen contact is with the heavy chain CDR3. Thus, the molecular recognition units are primarily responsible for the specificity of an antigen-binding site.

[0192] As used herein, the term “FR set” refers to the four flanking amino acid sequences which frame the CDRs of a CDR set of a heavy or light chain V region. Some FR residues may contact bound antigen; however, FRs are primarily responsible for folding the V region into the antigen-binding site, particularly the FR residues directly adjacent to the CDRS. Within FRs, certain amino residues and certain structural features are very highly conserved. In this regard, all V region sequences contain an internal disulfide loop of around 90 amino acid residues. When the V regions fold into a binding-site, the CDRs are displayed as projecting loop motifs which form an antigen-binding surface. It is generally recognized that there are conserved structural regions of FRs which influence the folded shape of the CDR loops into certain “canonical” structures—regardless of the precise CDR amino acid sequence. Further, certain FR residues are known to participate in non-covalent interdomain contacts which stabilize the interaction of the antibody heavy and light chains.

[0193] A number of “humanized” antibody molecules comprising an antigen-binding site derived from a non-human immunoglobulin have been described, including chimeric antibodies having rodent V regions and their associated CDRs fused to human constant domains (Winter et al. (1991) Nature 349:293-299; Lobuglio et al. (1989) Proc. Nat. Acad. Sci. USA 86:4220-4224; Shaw et al. (1987) J Immunol. 138:4534-4538; and Brown et al. (1987) Cancer Res. 47:3577-3583), rodent CDRs grafted into a human supporting FR prior to fusion with an appropriate human antibody constant domain (Riechmann et al. (1988) Nature 332:323-327; Verhoeyen et al. (1988) Science 239:1534-1536; and Jones et al. (1986) Nature 321:522-525), and rodent CDRs supported by recombinantly veneered rodent FRs (European Patent Publication No. 519,596, published Dec. 23, 1992). These “humanized” molecules are designed to minimize unwanted immunological response toward rodent antihuman antibody molecules which limits the duration and effectiveness of therapeutic applications of those moieties in human recipients.

[0194] As used herein, the terms “veneered FRs” and “recombinantly veneered FRs” refer to the selective replacement of FR residues from, e.g., a rodent heavy or light chain V region, with human FR residues in order to provide a xenogeneic molecule comprising an antigen-binding site which retains substantially all of the native FR polypeptide folding structure. Veneering techniques are based on the understanding that the ligand binding characteristics of an antigen-binding site are determined primarily by the structure and relative disposition of the heavy and light chain CDR sets within the antigen-binding surface. Davies et al. (1990) Ann. Rev. Biochem. 59:439-473. Thus, antigen binding specificity can be preserved in a humanized antibody only wherein the CDR structures, their interaction with each other, and their interaction with the rest of the V region domains are carefully maintained. By using veneering techniques, exterior (e.g., solvent-accessible) FR residues which are readily encountered by the immune system are selectively replaced with human residues to provide a hybrid molecule that comprises either a weakly immunogenic, or substantially non-immunogenic veneered surface.

[0195] The process of veneering makes use of the available sequence data for human antibody variable domains compiled by Kabat et al., in Sequences of Proteins of Immunological Interest, 4th ed., (U.S. Dept. of Health and Human Services, U.S. Government Printing Office, 1987), updates to the Kabat database, and other accessible U.S. and foreign databases (both nucleic acid and protein). Solvent accessibilities of V region amino acids can be deduced from the known three-dimensional structure for human and murine antibody fragments. There are two general steps in veneering a murine antigen-binding site. Initially, the FRs of the variable domains of an antibody molecule of interest are compared with corresponding FR sequences of human variable domains obtained from the above-identified sources. The most homologous human V regions are then compared residue by residue to corresponding murine amino acids. The residues in the murine FR which differ from the human counterpart are replaced by the residues present in the human moiety using recombinant techniques well known in the art. Residue switching is only carried out with moieties which are at least partially exposed (solvent accessible), and care is exercised in the replacement of amino acid residues which may have a significant effect on the tertiary structure of V region domains, such as proline, glycine and charged amino acids.

[0196] In this manner, the resultant “veneered” murine antigen-binding sites are thus designed to retain the murine CDR residues, the residues substantially adjacent to the CDRs, the residues identified as buried or mostly buried (solvent inaccessible), the residues believed to participate in non-covalent (e.g., electrostatic and hydrophobic) contacts between heavy and light chain domains, and the residues from conserved structural regions of the FRs which are believed to influence the “canonical” tertiary structures of the CDR loops. These design criteria are then used to prepare recombinant nucleotide sequences which combine the CDRs of both the heavy and light chain of a murine antigen-binding site into human-appearing FRs that can be used to transfect mammalian cells for the expression of recombinant human antibodies which exhibit the antigen specificity of the murine antibody molecule.

[0197] In another embodiment of the invention, monoclonal antibodies of the present invention may be coupled to one or more therapeutic agents. Suitable agents in this regard include radionuclides, differentiation inducers, drugs, toxins, and derivatives thereof. Preferred radionuclides include ⁹⁰y, ¹²³I, ¹²⁵I, ¹³¹I, ¹⁸⁶Re, ¹⁸⁸Re, ²¹¹At, and ²¹²Bi. Preferred drugs include methotrexate, and pyrimidine and purine analogs. Preferred differentiation inducers include phorbol esters and butyric acid. Preferred toxins include ricin, abrin, diptheria toxin, cholera toxin, gelonin, Pseudomonas exotoxin, Shigella toxin, and pokeweed antiviral protein.

[0198] A therapeutic agent may be coupled (e.g., covalently bonded) to a suitable monoclonal antibody either directly or indirectly (e.g., via a linker group). A direct reaction between an agent and an antibody is possible when each possesses a substituent capable of reacting with the other. For example, a nucleophilic group, such as an amino or sulfhydryl group, on one may be capable of reacting with a carbonyl-containing group, such as an anhydride or an acid halide, or with an alkyl group containing a good leaving group (e.g., a halide) on the other.

[0199] Alternatively, it may be desirable to couple a therapeutic agent and an antibody via a linker group. A linker group can function as a spacer to distance an antibody from an agent in order to avoid interference with binding capabilities. A linker group can also serve to increase the chemical reactivity of a substituent on an agent or an antibody, and thus increase the coupling efficiency. An increase in chemical reactivity may also facilitate the use of agents, or functional groups on agents, which otherwise would not be possible.

[0200] It will be evident to those skilled in the art that a variety of bifunctional or polyfunctional reagents, both homo- and hetero-functional (such as those described in the catalog of the Pierce Chemical Co., Rockford, Ill.), may be employed as the linker group. Coupling may be effected, for example, through amino groups, carboxyl groups, sulfhydryl groups or oxidized carbohydrate residues. There are numerous references describing such methodology, e.g., U.S. Pat. No. 4,671,958, to Rodwell et al.

[0201] Where a therapeutic agent is more potent when free from the antibody portion of the immunoconjugates of the present invention, it may be desirable to use a linker group which is cleavable during or upon internalization into a cell. A number of different cleavable linker groups have been described. The mechanisms for the intracellular release of an agent from these linker groups include cleavage by reduction of a disulfide bond (e.g., U.S. Pat. No. 4,489,710, to Spitler), by irradiation of a photolabile bond (e.g., U.S. Pat. No. 4,625,014, to Senter et al.), by hydrolysis of derivatized amino acid side chains (e.g., U.S. Pat. No. 4,638,045, to Kohn et al.), by serum complement-mediated hydrolysis (e.g., U.S. Pat. No. 4,671,958, to Rodwell et al.), and acid-catalyzed hydrolysis (e.g., U.S. Pat. No. 4,569,789, to Blattler et al.).

[0202] It may be desirable to couple more than one agent to an antibody. In one embodiment, multiple molecules of an agent are coupled to one antibody molecule. In another embodiment, more than one type of agent may be coupled to one antibody. Regardless of the particular embodiment, immunoconjugates with more than one agent may be prepared in a variety of ways. For example, more than one agent may be coupled directly to an antibody molecule, or linkers that provide multiple sites for attachment can be used. Alternatively, a carrier can be used.

[0203] A carrier may bear the agents in a variety of ways, including covalent bonding either directly or via a linker group. Suitable carriers include proteins such as albumins (e.g., U.S. Pat. No. 4,507,234, to Kato et al.), peptides and polysaccharides such as aminodextran (e.g., U.S. Pat. No. 4,699,784, to Shih et al.). A carrier may also bear an agent by noncovalent bonding or by encapsulation, such as within a liposome vesicle (e.g., U.S. Pat. Nos. 4,429,008 and 4,873,088). Carriers specific for radionuclide agents include radiohalogenated small molecules and chelating compounds. For example, U.S. Pat. No. 4,735,792 discloses representative radiohalogenated small molecules and their synthesis. A radionuclide chelate may be formed from chelating compounds that include those containing nitrogen and sulfur atoms as the donor atoms for binding the metal, or metal oxide, radionuclide. For example, U.S. Pat. No. 4,673,562, to Davison et al. discloses representative chelating compounds and their synthesis.

[0204] T Cell Compositions

[0205] The present invention, in another aspect, provides T cells specific for a tumor polypeptide disclosed herein, or for a variant or derivative thereof. Such cells may generally be prepared in vitro or ex vivo, using standard procedures. For example, T cells may be isolated from bone marrow, peripheral blood, or a fraction of bone marrow or peripheral blood of a patient, using a commercially available cell separation system, such as the Isolex™ System, available from Nexell Therapeutics, Inc. (Irvine, Calif.; see also U.S. Pat. Nos. 5,240,856; 5,215,926; WO 89/06280; WO 91/16116 and WO 92/07243). Alternatively, T cells may be derived from related or unrelated humans, non-human mammals, cell lines or cultures.

[0206] T cells may be stimulated with a polypeptide, polynucleotide encoding a polypeptide and/or an antigen presenting cell (APC) that expresses such a polypeptide. Such stimulation is performed under conditions and for a time sufficient to permit the generation of T cells that are specific for the polypeptide of interest. Preferably, a tumor polypeptide or polynucleotide of the invention is present within a delivery vehicle, such as a microsphere, to facilitate the generation of specific T cells.

[0207] T cells are considered to be specific for a polypeptide of the present invention if the T cells specifically proliferate, secrete cytokines or kill target cells coated with the polypeptide or expressing a gene encoding the polypeptide. T cell specificity may be evaluated using any of a variety of standard techniques. For example, within a chromium release assay or proliferation assay, a stimulation index of more than two fold increase in lysis and/or proliferation, compared to negative controls, indicates T cell specificity. Such assays may be performed, for example, as described in Chen et al., Cancer Res. 54:1065-1070, 1994. Alternatively, detection of the proliferation of T cells may be accomplished by a variety of known techniques. For example, T cell proliferation can be detected by measuring an increased rate of DNA synthesis (e.g., by pulse-labeling cultures of T cells with tritiated thymidine and measuring the amount of tritiated thymidine incorporated into DNA). Contact with a tumor polypeptide (100 ng/ml −100 μg/ml, preferably 200 ng/ml −25 μg/ml) for 3-7 days will typically result in at least a two fold increase in proliferation of the T cells. Contact as described above for 2-3 hours should result in activation of the T cells, as measured using standard cytokine assays in which a two fold increase in the level of cytokine release (e.g., TNF or IFN-γ) is indicative of T cell activation (see Coligan et al., Current Protocols in Immunology, vol. 1, Wiley Interscience (Greene 1998)). T cells that have been activated in response to a tumor polypeptide, polynucleotide or polypeptide-expressing APC may be CD4⁺ and/or CD8⁺. Tumor polypeptide-specific T cells may be expanded using standard techniques. Within preferred embodiments, the T cells are derived from a patient, a related donor or an unrelated donor, and are administered to the patient following stimulation and expansion.

[0208] For therapeutic purposes, CD4⁺ or CD8⁺ T cells that proliferate in response to a tumor polypeptide, polynucleotide or APC can be expanded in number either in vitro or in vivo. Proliferation of such T cells in vitro may be accomplished in a variety of ways. For example, the T cells can be re-exposed to a tumor polypeptide, or a short peptide corresponding to an immunogenic portion of such a polypeptide, with or without the addition of T cell growth factors, such as interleukin-2, and/or stimulator cells that synthesize a tumor polypeptide. Alternatively, one or more T cells that proliferate in the presence of the tumor polypeptide can be expanded in number by cloning. Methods for cloning cells are well known in the art, and include limiting dilution.

[0209] T Cell Receptor Compositions

[0210] The T cell receptor (TCR) consists of 2 different, highly variable polypeptide chains, termed the T-cell receptor α and β chains, that are linked by a disulfide bond (Janeway, Travers, Walport. Immunobiology. Fourth Ed., 148-159. Elsevier Science Ltd/Garland Publishing. 1999). The α/β heterodimer complexes with the invariant CD3 chains at the cell membrane. This complex recognizes specific antigenic peptides bound to MHC molecules. The enormous diversity of TCR specificities is generated much like immunoglobulin diversity, through somatic gene rearrangement. The β chain genes contain over 50 variable (V), 2 diversity (D), over 10 joining (J) segments, and 2 constant region segments (C). The α chain genes contain over 70 V segments, and over 60 J segments but no D segments, as well as one C segment. During T cell development in the thymus, the D to J gene rearrangement of the β chain occurs, followed by the V gene segment rearrangement to the DJ. This functional VDJ_{β} exon is transcribed and spliced to join to a C^{β}. For the a chain, a V_{α} gene segment rearranges to a J_{α} gene segment to create the functional exon that is then transcribed and spliced to the C_{α}. Diversity is further increased during the recombination process by the random addition of P and N-nucleotides between the V, D, and J segments of the β chain and between the V and J segments in the α chain (Janeway, Travers, Walport. Immunobiology. Fourth Ed., 98 and 150. Elsevier Science Ltd/Garland Publishing. 1999).

[0211] The present invention, in another aspect, provides TCRs specific for a polypeptide disclosed herein, or for a variant or derivative thereof. In accordance with the present invention, polynucleotide and amino acid sequences are provided for the V-J or V-D-J junctional regions or parts thereof for the alpha and beta chains of the T-cell receptor which recognize tumor polypeptides described herein. In general, this aspect of the invention relates to T-cell receptors which recognize or bind tumor polypeptides presented in the context of MHC. In a preferred embodiment the tumor antigens recognized by the T-cell receptors comprise a polypeptide of the present invention. For example, cDNA encoding a TCR specific for a colon tumor peptide can be isolated from T cells specific for a tumor polypeptide using standard molecular biological and recombinant DNA techniques.

[0212] This invention further includes the T-cell receptors or analogs thereof having substantially the same function or activity as the T-cell receptors of this invention which recognize or bind tumor polypeptides. Such receptors include, but are not limited to, a fragment of the receptor, or a substitution, addition or deletion mutant of a T-cell receptor provided herein. This invention also encompasses polypeptides or peptides that are substantially homologous to the T-cell receptors provided herein or that retain substantially the same activity. The term “analog” includes any protein or polypeptide having an amino acid residue sequence substantially identical to the T-cell receptors provided herein in which one or more residues, preferably no more than 5 residues, more preferably no more than 25 residues have been conservatively substituted with a functionally similar residue and which displays the functional aspects of the T-cell receptor as described herein.

[0213] The present invention further provides for suitable mammalian host cells, for example, non-specific T cells, that are transfected with a polynucleotide encoding TCRs specific for a polypeptide described herein, thereby rendering the host cell specific for the polypeptide. The α and β chains of the TCR may be contained on separate expression vectors or alternatively, on a single expression vector that also contains an internal ribosome entry site (IRES) for cap-independent translation of the gene downstream of the IRES. Said host cells expressing TCRs specific for the polypeptide may be used, for example, for adoptive immunotherapy of colon cancer as discussed further below.

[0214] In further aspects of the present invention, cloned TCRs specific for a polypeptide recited herein may be used in a kit for the diagnosis of colon cancer. For example, the nucleic acid sequence or portions thereof, of colon tumor-specific TCRs can be used as probes or primers for the detection of expression of the rearranged genes encoding the specific TCR in a biological sample. Therefore, the present invention further provides for an assay for detecting messenger RNA or DNA encoding the TCR specific for a polypeptide.

[0215] Pharmaceutical Compositions

[0216] In additional embodiments, the present invention concerns formulation of one or more of the polynucleotide, polypeptide, T-cell, TCR, and/or antibody compositions disclosed herein in pharmaceutically-acceptable carriers for administration to a cell or an animal, either alone, or in combination with one or more other modalities of therapy.

[0217] It will be understood that, if desired, a composition as disclosed herein may be administered in combination with other agents as well, such as, e.g., other proteins or polypeptides or various pharmaceutically-active agents. In fact, there is virtually no limit to other components that may also be included, given that the additional agents do not cause a significant adverse effect upon contact with the target cells or host tissues. The compositions may thus be delivered along with various other agents as required in the particular instance. Such compositions may be purified from host cells or other biological sources, or alternatively may be chemically synthesized as described herein. Likewise, such compositions may further comprise substituted or derivatized RNA or DNA compositions.

[0218] Therefore, in another aspect of the present invention, pharmaceutical compositions are provided comprising one or more of the polynucleotide, polypeptide, antibody, TCR, and/or T-cell compositions described herein in combination with a physiologically acceptable carrier. In certain preferred embodiments, the pharmaceutical compositions of the invention comprise immunogenic polynucleotide and/or polypeptide compositions of the invention for use in prophylactic and theraputic vaccine applications. Vaccine preparation is generally described in, for example, M. F. Powell and M. J. Newman, eds., “Vaccine Design (the subunit and adjuvant approach),” Plenum Press (NY, 1995). Generally, such compositions will comprise one or more polynucleotide and/or polypeptide compositions of the present invention in combination with one or more immunostimulants.

[0219] It will be apparent that any of the pharmaceutical compositions described herein can contain pharmaceutically acceptable salts of the polynucleotides and polypeptides of the invention. Such salts can be prepared, for example, from pharmaceutically acceptable non-toxic bases, including organic bases (e.g., salts of primary, secondary and tertiary amines and basic amino acids) and inorganic bases (e.g., sodium, potassium, lithium, ammonium, calcium and magnesium salts).

[0220] In another embodiment, illustrative immunogenic compositions, e.g., vaccine compositions, of the present invention comprise DNA encoding one or more of the polypeptides as described above, such that the polypeptide is generated in situ. As noted above, the polynucleotide may be administered within any of a variety of delivery systems known to those of ordinary skill in the art. Indeed, numerous gene delivery techniques are well known in the art, such as those described by Rolland, Crit. Rev. Therap. Drug Carrier Systems 15:143-198, 1998, and references cited therein. Appropriate polynucleotide expression systems will, of course, contain the necessary regulatory DNA regulatory sequences for expression in a patient (such as a suitable promoter and terminating signal). Alternatively, bacterial delivery systems may involve the administration of a bacterium (such as Bacillus-Calmette-Guerrin) that expresses an immunogenic portion of the polypeptide on its cell surface or secretes such an epitope.

[0221] Therefore, in certain embodiments, polynucleotides encoding immunogenic polypeptides described herein are introduced into suitable mammalian host cells for expression using any of a number of known viral-based systems. In one illustrative embodiment, retroviruses provide a convenient and effective platform for gene delivery systems. A selected nucleotide sequence encoding a polypeptide of the present invention can be inserted into a vector and packaged in retroviral particles using techniques known in the art. The recombinant virus can then be isolated and delivered to a subject. A number of illustrative retroviral systems have been described (e.g., U.S. Pat. No. 5,219,740; Miller and Rosman (1989) BioTechniques 7:980-990; Miller, A. D. (1990) Human Gene Therapy 1:5-14; Scarpa et al. (1991) Virology 180:849-852; Burns et al. (1993) Proc. Natl. Acad. Sci. USA 90:8033-8037; and Boris-Lawrie and Temin (1993) Cur. Opin. Genet. Develop. 3:102-109.

[0222] In addition, a number of illustrative adenovirus-based systems have also been described. Unlike retroviruses which integrate into the host genome, adenoviruses persist extrachromosomally thus minimizing the risks associated with insertional mutagenesis (Haj-Ahmad and Graham (1986) J. Virol. 57:267-274; Bett et al. (1993) J. Virol. 67:5911-5921; Mittereder et al. (1994) Human Gene Therapy 5:717-729; Seth et al. (1994) J. Virol. 68:933-940; Barr et al. (1994) Gene Therapy 1:51-58; Berkner, K. L. (1988) BioTechniques 6:616-629; and Rich et al. (1993) Human Gene Therapy 4:461-476).

[0223] Various adeno-associated virus (AAV) vector systems have also been developed for polynucleotide delivery. AAV vectors can be readily constructed using techniques well known in the art. See, e.g., U.S. Pat. Nos. 5,173,414 and 5,139,941; International Publication Nos. WO 92/01070 and WO 93/03769; Lebkowski et al. (1988) Molec. Cell. Biol. 8:3988-3996; Vincent et al. (1990) Vaccines 90 (Cold Spring Harbor Laboratory Press); Carter, B. J. (1992) Current Opinion in Biotechnology 3:533-539; Muzyczka, N. (1992) Current Topics in Microbiol. and Immunol. 158:97-129; Kotin, R. M. (1994) Human Gene Therapy 5:793-801; Shelling and Smith (1994) Gene Therapy 1:165-169; and Zhou et al. (1994) J. Exp. Med. 179:1867-1875.

[0224] Additional viral vectors useful for delivering the polynucleotides encoding polypeptides of the present invention by gene transfer include those derived from the pox family of viruses, such as vaccinia virus and avian poxvirus. By way of example, vaccinia virus recombinants expressing the novel molecules can be constructed as follows. The DNA encoding a polypeptide is first inserted into an appropriate vector so that it is adjacent to a vaccinia promoter and flanking vaccinia DNA sequences, such as the sequence encoding thymidine kinase (TK). This vector is then used to transfect cells which are simultaneously infected with vaccinia. Homologous recombination serves to insert the vaccinia promoter plus the gene encoding the polypeptide of interest into the viral genome. The resulting TK.sup.(−) recombinant can be selected by culturing the cells in the presence of 5-bromodeoxyuridine and picking viral plaques resistant thereto.

[0225] A vaccinia-based infection/transfection system can be conveniently used to provide for inducible, transient expression or coexpression of one or more polypeptides described herein in host cells of an organism. In this particular system, cells are first infected in vitro with a vaccinia virus recombinant that encodes the bacteriophage T7 RNA polymerase. This polymerase displays exquisite specificity in that it only transcribes templates bearing T7 promoters. Following infection, cells are transfected with the polynucleotide or polynucleotides of interest, driven by a T7 promoter. The polymerase expressed in the cytoplasm from the vaccinia virus recombinant transcribes the transfected DNA into RNA which is then translated into polypeptide by the host translational machinery. The method provides for high level, transient, cytoplasmic production of large quantities of RNA and its translation products. See, e.g., Elroy-Stein and Moss, Proc. Natl. Acad. Sci. USA (1990) 87:6743-6747; Fuerst et al. Proc. Natl. Acad. Sci. USA (1986) 83:8122-8126.

[0226] Alternatively, avipoxviruses, such as the fowlpox and canarypox viruses, can also be used to deliver the coding sequences of interest. Recombinant avipox viruses, expressing immunogens from mammalian pathogens, are known to confer protective immunity when administered to non-avian species. The use of an Avipox vector is particularly desirable in human and other mammalian species since members of the Avipox genus can only productively replicate in susceptible avian species and therefore are not infective in mammalian cells. Methods for producing recombinant Avipoxviruses are known in the art and employ genetic recombination, as described above with respect to the production of vaccinia viruses. See, e.g., WO 91/12882; WO 89/03429; and WO 92/03545.

[0227] Any of a number of alphavirus vectors can also be used for delivery of polynucleotide compositions of the present invention, such as those vectors described in U.S. Pat. Nos. 5,843,723; 6,015,686; 6,008,035 and 6,015,694. Certain vectors based on Venezuelan Equine Encephalitis (VEE) can also be used, illustrative examples of which can be found in U.S. Pat. Nos. 5,505,947 and 5,643,576.

[0228] Moreover, molecular conjugate vectors, such as the adenovirus chimeric vectors described in Michael et al. J. Biol. Chem. (1993) 268:6866-6869 and Wagner et al. Proc. Natl. Acad. Sci. USA (1992) 89:6099-6103, can also be used for gene delivery under the invention.

[0229] Additional illustrative information on these and other known viral-based delivery systems can be found, for example, in Fisher-Hoch et al., Proc. Natl. Acad. Sci. USA 86:317-321, 1989; Flexner et al., Ann. N.Y. Acad. Sci. 569:86-103, 1989; Flexner et al., Vaccine 8:17-21, 1990; U.S. Pat. Nos. 4,603,112, 4,769,330, and 5,017,487; WO 89/01973; U.S. Pat. No. 4,777,127; GB 2,200,651; EP 0,345,242; WO 91/02805; Berkner, Biotechniques 6:616-627, 1988; Rosenfeld et al., Science 252:431-434, 1991; Kolls et al., Proc. Natl. Acad. Sci. USA 91:215-219, 1994; Kass-Eisler et al., Proc. Natl. Acad. Sci. USA 90:11498-11502, 1993; Guzman et al., Circulation 88:2838-2848, 1993; and Guzman et al., Cir. Res. 73:1202-1207, 1993.

[0230] In certain embodiments, a polynucleotide may be integrated into the genome of a target cell. This integration may be in the specific location and orientation via homologous recombination (gene replacement) or it may be integrated in a random, non-specific location (gene augmentation). In yet further embodiments, the polynucleotide may be stably maintained in the cell as a separate, episomal segment of DNA. Such polynucleotide segments or “episomes” encode sequences sufficient to permit maintenance and replication independent of or in synchronization with the host cell cycle. The manner in which the expression construct is delivered to a cell and where in the cell the polynucleotide remains is dependent on the type of expression construct employed.

[0231] In another embodiment of the invention, a polynucleotide is administered/delivered as “naked” DNA, for example as described in Ulmer et al., Science 259:1745-1749, 1993 and reviewed by Cohen, Science 259:1691-1692, 1993. The uptake of naked DNA may be increased by coating the DNA onto biodegradable beads, which are efficiently transported into the cells.

[0232] In still another embodiment, a composition of the present invention can be delivered via a particle bombardment approach, many of which have been described. In one illustrative example, gas-driven particle acceleration can be achieved with devices such as those manufactured by Powderject Pharmaceuticals PLC (Oxford, UK) and Powderject Vaccines Inc. (Madison, Wis.), some examples of which are described in U.S. Pat. Nos. 5,846,796; 6,010,478; 5,865,796; 5,584,807; and EP Patent No. 0500 799. This approach offers a needle-free delivery approach wherein a dry powder formulation of microscopic particles, such as polynucleotide or polypeptide particles, are accelerated to high speed within a helium gas jet generated by a hand held device, propelling the particles into a target tissue of interest.

[0233] In a related embodiment, other devices and methods that may be useful for gas-driven needle-less injection of compositions of the present invention include those provided by Bioject, Inc. (Portland, Oreg.), some examples of which are described in U.S. Pat. Nos. 4,790,824; 5,064,413; 5,312,335; 5,383,851; 5,399,163; 5,520,639 and 5,993,412.

[0234] According to another embodiment, the pharmaceutical compositions described herein will comprise one or more immunostimulants in addition to the immunogenic polynucleotide, polypeptide, antibody, T-cell, TCR, and/or APC compositions of this invention. An immunostimulant refers to essentially any substance that enhances or potentiates an immune response (antibody and/or cell-mediated) to an exogenous antigen. One preferred type of immunostimulant comprises an adjuvant. Many adjuvants contain a substance designed to protect the antigen from rapid catabolism, such as aluminum hydroxide or mineral oil, and a stimulator of immune responses, such as lipid A, Bortadella pertussis or Mycobacterium tuberculosisderived proteins. Certain adjuvants are commercially available as, for example, Freund's Incomplete Adjuvant and Complete Adjuvant (Difco Laboratories, Detroit, Mich.); Merck Adjuvant 65 (Merck and Company, Inc., Rahway, N.J.); AS-2 (SmithKline Beecham, Philadelphia, Pa.); aluminum salts such as aluminum hydroxide gel (alum) or aluminum phosphate; salts of calcium, iron or zinc; an insoluble suspension of acylated tyrosine; acylated sugars; cationically or anionically derivatized polysaccharides; polyphosphazenes; biodegradable microspheres; monophosphoryl lipid A and quil A. Cytokines, such as GM-CSF, interleukin-2,-7,-12, and other like growth factors, may also be used as adjuvants.

[0235] Within certain embodiments of the invention, the adjuvant composition is preferably one that induces an immune response predominantly of the Th1 type. High levels of Th1-type cytokines (e.g., IFN-γ, TNFα, IL-2 and IL-12) tend to favor the induction of cell mediated immune responses to an administered antigen. In contrast, high levels of Th2-type cytokines (e.g., IL-4, IL-5, IL-6 and IL-10) tend to favor the induction of humoral immune responses. Following application of a vaccine as provided herein, a patient will support an immune response that includes Th1- and Th2-type responses. Within a preferred embodiment, in which a response is predominantly Th1-type, the level of Th1-type cytokines will increase to a greater extent than the level of Th2-type cytokines. The levels of these cytokines may be readily assessed using standard assays. For a review of the families of cytokines, see Mosmann and Coffman, Ann. Rev. Immunol. 7:145-173, 1989.

[0236] Certain preferred adjuvants for eliciting a predominantly Th1-type response include, for example, a combination of monophosphoryl lipid A, preferably 3-de-O-acylated monophosphoryl lipid A, together with an aluminum salt. MPL® adjuvants are available from Corixa Corporation (Seattle, Wash.; see, for example, U.S. Pat. Nos. 4,436,727; 4,877,611; 4,866,034 and 4,912,094). CpG-containing oligonucleotides (in which the CpG dinucleotide is unmethylated) also induce a predominantly Th1 response. Such oligonucleotides are well known and are described, for example, in WO 96/02555, WO 99/33488 and U.S. Pat. Nos. 6,008,200 and 5,856,462. Immunostimulatory DNA sequences are also described, for example, by Sato et al., Science 273:352, 1996. Another preferred adjuvant comprises a saponin, such as Quil A, or derivatives thereof, including QS21 and QS7 (Aquila Biopharmaceuticals Inc., Framingham, Mass.); Escin; Digitonin; or Gypsophila or Chenopodium quinoa saponins . Other preferred formulations include more than one saponin in the adjuvant combinations of the present invention, for example combinations of at least two of the following group comprising QS21, QS7, Quil A, β-escin, or digitonin.

[0237] Alternatively the saponin formulations may be combined with vaccine vehicles composed of chitosan or other polycationic polymers, polylactide and polylactide-co-glycolide particles, poly-N-acetyl glucosamine-based polymer matrix, particles composed of polysaccharides or chemically modified polysaccharides, liposomes and lipid-based particles, particles composed of glycerol monoesters, etc. The saponins may also be formulated in the presence of cholesterol to form particulate structures such as liposomes or ISCOMs. Furthermore, the saponins may be formulated together with a polyoxyethylene ether or ester, in either a non-particulate solution or suspension, or in a particulate structure such as a paucilamelar liposome or ISCOM. The saponins may also be formulated with excipients such as Carbopo1^{R} to increase viscosity, or may be formulated in a dry powder form with a powder excipient such as lactose.

[0238] In one preferred embodiment, the adjuvant system includes the combination of a monophosphoryl lipid A and a saponin derivative, such as the combination of QS21 and 3D-MPL® adjuvant, as described in WO 94/00153, or a less reactogenic composition where the QS21 is quenched with cholesterol, as described in WO 96/33739. Other preferred formulations comprise an oil-in-water emulsion and tocopherol. Another particularly preferred adjuvant formulation employing QS21, 3D-MPL® adjuvant and tocopherol in an oil-in-water emulsion is described in WO 95/17210.

[0239] Another enhanced adjuvant system involves the combination of a CpG-containing oligonucleotide and a saponin derivative particularly the combination of CpG and QS21 is disclosed in WO 00/09159. Preferably the formulation additionally comprises an oil in water emulsion and tocopherol.

[0240] Additional illustrative adjuvants for use in the pharmaceutical compositions of the invention include Montanide ISA 720 (Seppic, France), SAF (Chiron, Calif., United States), ISCOMS (CSL), MF-59 (Chiron), the SBAS series of adjuvants (e.g., SBAS-2 or SBAS-4, available from SmithKline Beecham, Rixensart, Belgium), Detox (Enhanzyn®) (Corixa, Hamilton, Mont.), RC-529 (Corixa, Hamilton, Mont.) and other aminoalkyl glucosaminide 4-phosphates (AGPs), such as those described in pending U.S. patent application Ser. Nos. 08/853,826 and 09/074,720, the disclosures of which are incorporated herein by reference in their entireties, and polyoxyethylene ether adjuvants such as those described in WO 99/52549A1.

[0241] Other preferred adjuvants include adjuvant molecules of the general formula

(I): HO(CH₂CH₂O)ₙ—A—R,

[0242] wherein, n is 1-50, A is a bond or —C(O)—, R is C₁₋₅₀ alkyl or Phenyl C₁₋₅₀ alkyl.

[0243] One embodiment of the present invention consists of a vaccine formulation comprising a polyoxyethylene ether of general formula (I), wherein n is between 1 and 50, preferably 4-24, most preferably 9; the R component is C₁₋₅₀, preferably C₄-C₂₀ alkyl and most preferably C₁₂ alkyl, and A is a bond. The concentration of the polyoxyethylene ethers should be in the range 0.1-20%, preferably from 0.1-10%, and most preferably in the range 0.1-1%. Preferred polyoxyethylene ethers are selected from the following group: polyoxyethylene-9-lauryl ether, polyoxyethylene-9-steoryl ether, polyoxyethylene-8-steoryl ether, polyoxyethylene-4-lauryl ether, polyoxyethylene-35-lauryl ether, and polyoxyethylene-23-lauryl ether. Polyoxyethylene ethers such as polyoxyethylene lauryl ether are described in the Merck index (12^{th} edition: entry 7717). These adjuvant molecules are described in WO 99/52549.

[0244] The polyoxyethylene ether according to the general formula (I) above may, if desired, be combined with another adjuvant. For example, a preferred adjuvant combination is preferably with CpG as described in the pending UK patent application GB 9820956.2.

[0245] According to another embodiment of this invention, an immunogenic composition described herein is delivered to a host via antigen presenting cells (APCs), such as dendritic cells, macrophages, B cells, monocytes and other cells that may be engineered to be efficient APCs. Such cells may, but need not, be genetically modified to increase the capacity for presenting the antigen, to improve activation and/or maintenance of the T cell response, to have anti-tumor effects per se and/or to be immunologically compatible with the receiver (i.e., matched HLA haplotype). APCs may generally be isolated from any of a variety of biological fluids and organs, including tumor and peritumoral tissues, and may be autologous, allogeneic, syngeneic or xenogeneic cells.

[0246] Certain preferred embodiments of the present invention use dendritic cells or progenitors thereof as antigen-presenting cells. Dendritic cells are highly potent APCs (Banchereau and Steinman, Nature 392:245-251, 1998) and have been shown to be effective as a physiological adjuvant for eliciting prophylactic or therapeutic antitumor immunity (see Timmerman and Levy, Ann. Rev. Med. 50:507-529, 1999). In general, dendritic cells may be identified based on their typical shape (stellate in situ, with marked cytoplasmic processes (dendrites) visible in vitro), their ability to take up, process and present antigens with high efficiency and their ability to activate naive T cell responses. Dendritic cells may, of course, be engineered to express specific cell-surface receptors or ligands that are not commonly found on dendritic cells in vivo or ex vivo, and such modified dendritic cells are contemplated by the present invention. As an alternative to dendritic cells, secreted vesicles antigen-loaded dendritic cells (called exosomes) may be used within a vaccine (see Zitvogel et al., Nature Med. 4:594-600, 1998).

[0247] Dendritic cells and progenitors may be obtained from peripheral blood, bone marrow, tumor-infiltrating cells, peritumoral tissues-infiltrating cells, lymph nodes, spleen, skin, umbilical cord blood or any other suitable tissue or fluid. For example, dendritic cells may be differentiated ex vivo by adding a combination of cytokines such as GM-CSF, IL-4, IL-13 and/or TNFα to cultures of monocytes harvested from peripheral blood. Alternatively, CD34 positive cells harvested from peripheral blood, umbilical cord blood or bone marrow may be differentiated into dendritic cells by adding to the culture medium combinations of GM-CSF, IL-3, TNFα, CD40 ligand, LPS, flt3 ligand and/or other compound(s) that induce differentiation, maturation and proliferation of dendritic cells.

[0248] Dendritic cells are conveniently categorized as “immature” and “mature” cells, which allows a simple way to discriminate between two well characterized phenotypes. However, this nomenclature should not be construed to exclude all possible intermediate stages of differentiation. Immature dendritic cells are characterized as APC with a high capacity for antigen uptake and processing, which correlates with the high expression of Fcγ receptor and mannose receptor. The mature phenotype is typically characterized by a lower expression of these markers, but a high expression of cell surface molecules responsible for T cell activation such as class I and class II MHC, adhesion molecules (e.g., CD54 and CD11) and costimulatory molecules (e.g., CD40, CD80, CD86 and 4-1BB).

[0249] APCs may generally be transfected with a polynucleotide of the invention (or portion or other variant thereof) such that the encoded polypeptide, or an immunogenic portion thereof, is expressed on the cell surface. Such transfection may take place ex vivo, and a pharmaceutical composition comprising such transfected cells may then be used for therapeutic purposes, as described herein. Alternatively, a gene delivery vehicle that targets a dendritic or other antigen presenting cell may be administered to a patient, resulting in transfection that occurs in vivo. In vivo and ex vivo transfection of dendritic cells, for example, may generally be performed using any methods known in the art, such as those described in WO 97/24447, or the gene gun approach described by Mahvi et al., Immunology and cell Biology 75:456-460, 1997. Antigen loading of dendritic cells may be achieved by incubating dendritic cells or progenitor cells with the tumor polypeptide, DNA (naked or within a plasmid vector) or RNA; or with antigen-expressing recombinant bacterium or viruses (e.g., vaccinia, fowlpox, adenovirus or lentivirus vectors). Prior to loading, the polypeptide may be covalently conjugated to an immunological partner that provides T cell help (e.g., a carrier molecule). Alternatively, a dendritic cell may be pulsed with a non-conjugated immunological partner, separately or in the presence of the polypeptide.

[0250] While any suitable carrier known to those of ordinary skill in the art may be employed in the pharmaceutical compositions of this invention, the type of carrier will typically vary depending on the mode of administration. Compositions of the present invention may be formulated for any appropriate manner of administration, including for example, topical, oral, nasal, mucosal, intravenous, intracranial, intraperitoneal, subcutaneous and intramuscular administration.

[0251] Carriers for use within such pharmaceutical compositions are biocompatible, and may also be biodegradable. In certain embodiments, the formulation preferably provides a relatively constant level of active component release. In other embodiments, however, a more rapid rate of release immediately upon administration may be desired. The formulation of such compositions is well within the level of ordinary skill in the art using known techniques. Illustrative carriers useful in this regard include microparticles of poly(lactide-co-glycolide), polyacrylate, latex, starch, cellulose, dextran and the like. Other illustrative delayed-release carriers include supramolecular biovectors, which comprise a non-liquid hydrophilic core (e.g., a cross-linked polysaccharide or oligosaccharide) and, optionally, an external layer comprising an amphiphilic compound, such as a phospholipid (see e.g., U.S. Pat. No. 5,151,254 and PCT applications WO 94/20078, WO/94/23701 and WO 96/06638). The amount of active compound contained within a sustained release formulation depends upon the site of implantation, the rate and expected duration of release and the nature of the condition to be treated or prevented.

[0252] In another illustrative embodiment, biodegradable microspheres (e.g., polylactate polyglycolate) are employed as carriers for the compositions of this invention. Suitable biodegradable microspheres are disclosed, for example, in U.S. Pat. Nos. 4,897,268; 5,075,109; 5,928,647; 5,811,128; 5,820,883; 5,853,763; 5,814,344, 5,407,609 and 5,942,252. Modified hepatitis B core protein carrier systems, such as described in WO/99 40934, and references cited therein, will also be useful for many applications. Another illustrative carrier/delivery system employs a carrier comprising particulate-protein complexes, such as those described in U.S. Pat. No. 5,928,647, which are capable of inducing a class I-restricted cytotoxic T lymphocyte responses in a host.

[0253] In another illustrative embodiment, calcium phosphate core particles are employed as carriers, vaccine adjuvants, or as controlled release matrices for the compositions of this invention. Exemplary calcium phosphate particles are disclosed, for example, in published patent application No. WO/0046147.

[0254] The pharmaceutical compositions of the invention will often further comprise one or more buffers (e.g., neutral buffered saline or phosphate buffered saline), carbohydrates (e.g., glucose, mannose, sucrose or dextrans), mannitol, proteins, polypeptides or amino acids such as glycine, antioxidants, bacteriostats, chelating agents such as EDTA or glutathione, adjuvants (e.g., aluminum hydroxide), solutes that render the formulation isotonic, hypotonic or weakly hypertonic with the blood of a recipient, suspending agents, thickening agents and/or preservatives. Alternatively, compositions of the present invention may be formulated as a lyophilizate.

[0255] The pharmaceutical compositions described herein may be presented in unit-dose or multi-dose containers, such as sealed ampoules or vials. Such containers are typically sealed in such a way to preserve the sterility and stability of the formulation until use. In general, formulations may be stored as suspensions, solutions or emulsions in oily or aqueous vehicles. Alternatively, a pharmaceutical composition may be stored in a freeze-dried condition requiring only the addition of a sterile liquid carrier immediately prior to use.

[0256] The development of suitable dosing and treatment regimens for using the particular compositions described herein in a variety of treatment regimens, including e.g., oral, parenteral, intravenous, intranasal, and intramuscular administration and formulation, is well known in the art, some of which are briefly discussed below for general purposes of illustration.

[0257] In certain applications, the pharmaceutical compositions disclosed herein may be delivered via oral administration to an animal. As such, these compositions may be formulated with an inert diluent or with an assimilable edible carrier, or they may be enclosed in hard- or soft-shell gelatin capsule, or they may be compressed into tablets, or they may be incorporated directly with the food of the diet.

[0258] The active compounds may even be incorporated with excipients and used in the form of ingestible tablets, buccal tables, troches, capsules, elixirs, suspensions, syrups, wafers, and the like (see, for example, Mathiowitz et al., Nature Mar. 27, 1997;386(6623):410-4; Hwang et al., Crit Rev Ther Drug Carrier Syst 1998;15(3):243-84; U.S. Pat. Nos. 5,641,515; 5,580,579 and 5,792,451). Tablets, troches, pills, capsules and the like may also contain any of a variety of additional components, for example, a binder, such as gum tragacanth, acacia, cornstarch, or gelatin; excipients, such as dicalcium phosphate; a disintegrating agent, such as corn starch, potato starch, alginic acid and the like; a lubricant, such as magnesium stearate; and a sweetening agent, such as sucrose, lactose or saccharin may be added or a flavoring agent, such as peppermint, oil of wintergreen, or cherry flavoring. When the dosage unit form is a capsule, it may contain, in addition to materials of the above type, a liquid carrier. Various other materials may be present as coatings or to otherwise modify the physical form of the dosage unit. For instance, tablets, pills, or capsules may be coated with shellac, sugar, or both. Of course, any material used in preparing any dosage unit form should be pharmaceutically pure and substantially non-toxic in the amounts employed. In addition, the active compounds may be incorporated into sustained-release preparation and formulations.

[0259] Typically, these formulations will contain at least about 0.1% of the active compound or more, although the percentage of the active ingredient(s) may, of course, be varied and may conveniently be between about 1 or 2% and about 60% or 70% or more of the weight or volume of the total formulation. Naturally, the amount of active compound(s) in each therapeutically useful composition may be prepared is such a way that a suitable dosage will be obtained in any given unit dose of the compound. Factors such as solubility, bioavailability, biological half-life, route of administration, product shelf life, as well as other pharmacological considerations will be contemplated by one skilled in the art of preparing such pharmaceutical formulations, and as such, a variety of dosages and treatment regimens may be desirable.

[0260] For oral administration the compositions of the present invention may alternatively be incorporated with one or more excipients in the form of a mouthwash, dentifrice, buccal tablet, oral spray, or sublingual orally-administered formulation. Alternatively, the active ingredient may be incorporated into an oral solution such as one containing sodium borate, glycerin and potassium bicarbonate, or dispersed in a dentifrice, or added in a therapeutically-effective amount to a composition that may include water, binders, abrasives, flavoring agents, foaming agents, and humectants. Alternatively the compositions may be fashioned into a tablet or solution form that may be placed under the tongue or otherwise dissolved in the mouth.

[0261] In certain circumstances it will be desirable to deliver the pharmaceutical compositions disclosed herein parenterally, intravenously, intramuscularly, or even intraperitoneally. Such approaches are well known to the skilled artisan, some of which are further described, for example, in U.S. Pat. Nos. 5,543,158; 5,641,515 and 5,399,363. In certain embodiments, solutions of the active compounds as free base or pharmacologically acceptable salts may be prepared in water suitably mixed with a surfactant, such as hydroxypropylcellulose. Dispersions may also be prepared in glycerol, liquid polyethylene glycols, and mixtures thereof and in oils. Under ordinary conditions of storage and use, these preparations generally will contain a preservative to prevent the growth of microorganisms.

[0262] Illustrative pharmaceutical forms suitable for injectable use include sterile aqueous solutions or dispersions and sterile powders for the extemporaneous preparation of sterile injectable solutions or dispersions (for example, see U.S. Pat. No. 5,466,468). In all cases the form must be sterile and must be fluid to the extent that easy syringability exists. It must be stable under the conditions of manufacture and storage and must be preserved against the contaminating action of microorganisms, such as bacteria and fungi. The carrier can be a solvent or dispersion medium containing, for example, water, ethanol, polyol (e.g., glycerol, propylene glycol, and liquid polyethylene glycol, and the like), suitable mixtures thereof, and/or vegetable oils. Proper fluidity may be maintained, for example, by the use of a coating, such as lecithin, by the maintenance of the required particle size in the case of dispersion and/or by the use of surfactants. The prevention of the action of microorganisms can be facilitated by various antibacterial and antifungal agents, for example, parabens, chlorobutanol, phenol, sorbic acid, thimerosal, and the like. In many cases, it will be preferable to include isotonic agents, for example, sugars or sodium chloride. Prolonged absorption of the injectable compositions can be brought about by the use in the compositions of agents delaying absorption, for example, aluminum monostearate and gelatin.

[0263] In one embodiment, for parenteral administration in an aqueous solution, the solution should be suitably buffered if necessary and the liquid diluent first rendered isotonic with sufficient saline or glucose. These particular aqueous solutions are especially suitable for intravenous, intramuscular, subcutaneous and intraperitoneal administration. In this connection, a sterile aqueous medium that can be employed will be known to those of skill in the art in light of the present disclosure. For example, one dosage may be dissolved in 1 ml of isotonic NaCl solution and either added to 1000 ml of hypodermoclysis fluid or injected at the proposed site of infusion, (see for example, “Remington's Pharmaceutical Sciences” 15th Edition, pages 1035-1038 and 1570-1580). Some variation in dosage will necessarily occur depending on the condition of the subject being treated. Moreover, for human administration, preparations will of course preferably meet sterility, pyrogenicity, and the general safety and purity standards as required by FDA Office of Biologics standards.

[0264] In another embodiment of the invention, the compositions disclosed herein may be formulated in a neutral or salt form. Illustrative pharmaceutically-acceptable salts include the acid addition salts (formed with the free amino groups of the protein) and which are formed with inorganic acids such as, for example, hydrochloric or phosphoric acids, or such organic acids as acetic, oxalic, tartaric, mandelic, and the like. Salts formed with the free carboxyl groups can also be derived from inorganic bases such as, for example, sodium, potassium, ammonium, calcium, or ferric hydroxides, and such organic bases as isopropylamine, trimethylamine, histidine, procaine and the like. Upon formulation, solutions will be administered in a manner compatible with the dosage formulation and in such amount as is therapeutically effective.

[0265] The carriers can further comprise any and all solvents, dispersion media, vehicles, coatings, diluents, antibacterial and antifungal agents, isotonic and absorption delaying agents, buffers, carrier solutions, suspensions, colloids, and the like. The use of such media and agents for pharmaceutical active substances is well known in the art. Except insofar as any conventional media or agent is incompatible with the active ingredient, its use in the therapeutic compositions is contemplated. Supplementary active ingredients can also be incorporated into the compositions. The phrase “pharmaceutically-acceptable” refers to molecular entities and compositions that do not produce an allergic or similar untoward reaction when administered to a human.

[0266] In certain embodiments, the pharmaceutical compositions may be delivered by intranasal sprays, inhalation, and/or other aerosol delivery vehicles. Methods for delivering genes, nucleic acids, and peptide compositions directly to the lungs via nasal aerosol sprays has been described, e.g., in U.S. Pat. No. 5,756,353 and U.S. Pat. 5,804,212. Likewise, the delivery of drugs using intranasal microparticle resins (Takenaga et al., J Controlled Release Mar. 2, 1998;52(1-2):81-7) and lysophosphatidyl-glycerol compounds (U.S. Pat. No. 5,725,871) are also well-known in the pharmaceutical arts. Likewise, illustrative transmucosal drug delivery in the form of a polytetrafluoroetheylene support matrix is described in U.S. Pat. No. 5,780,045.

[0267] In certain embodiments, liposomes, nanocapsules, microparticles, lipid particles, vesicles, and the like, are used for the introduction of the compositions of the present invention into suitable host cells/organisms. In particular, the compositions of the present invention may be formulated for delivery either encapsulated in a lipid particle, a liposome, a vesicle, a nanosphere, or a nanoparticle or the like. Alternatively, compositions of the present invention can be bound, either covalently or non-covalently, to the surface of such carrier vehicles.

[0268] The formation and use of liposome and liposome-like preparations as potential drug carriers is generally known to those of skill in the art (see for example, Lasic, Trends Biotechnol Jul. 16, 1998 (7):307-21; Takakura, Nippon Rinsho 1998 March;56(3):691-5; Chandran et al., Indian J Exp Biol. 1997 August;35(8):801-9; Margalit, Crit Rev Ther Drug Carrier Syst. 1995;12(2-3):233-61; U.S. Pat. Nos. 5,567,434; 5,552,157; 5,565,213; 5,738,868 and 5,795,587, each specifically incorporated herein by reference in its entirety).

[0269] Liposomes have been used successfully with a number of cell types that are normally difficult to transfect by other procedures, including T cell suspensions, primary hepatocyte cultures and PC 12 cells (Renneisen et al., J Biol Chem. Sep. 25, 1990;265(27):16337-42; Muller et al., DNA Cell Biol. Apr. 9, 1990(3):221-9). In addition, liposomes are free of the DNA length constraints that are typical of viral-based delivery systems. Liposomes have been used effectively to introduce genes, various drugs, radiotherapeutic agents, enzymes, viruses, transcription factors, allosteric effectors and the like, into a variety of cultured cell lines and animals. Furthermore, he use of liposomes does not appear to be associated with autoimmune responses or unacceptable toxicity after systemic delivery.

[0270] In certain embodiments, liposomes are formed from phospholipids that are dispersed in an aqueous medium and spontaneously form multilamellar concentric bilayer vesicles (also termed multilamellar vesicles (MLVs).

[0271] Alternatively, in other embodiments, the invention provides for pharmaceutically-acceptable nanocapsule formulations of the compositions of the present invention. Nanocapsules can generally entrap compounds in a stable and reproducible way (see, for example, Quintanar-Guerrero et al., Drug Dev Ind Pharm. Dec. 24, 1998(12):1113-28). To avoid side effects due to intracellular polymeric overloading, such ultrafine particles (sized around 0.1 μm) may be designed using polymers able to be degraded in vivo. Such particles can be made as described, for example, by Couvreur et al., Crit Rev Ther Drug Carrier Syst. 1988;5(1):1-20; zur Muhlen et al., Eur J Pharm Biopharm. 1998 March;45(2):149-55; Zambaux et al. J Controlled Release. Jan. 2, 1998;50(1-3):31-40; and U.S. Pat. No. 5,145,684.

[0272] Cancer Therapeutic Methods

[0273] Immunologic approaches to cancer therapy are based on the recognition that cancer cells can often evade the body's defenses against aberrant or foreign cells and molecules, and that these defenses might be therapeutically stimulated to regain the lost ground, e.g. pgs. 623-648 in Klein, Immunology (Wiley-Interscience, New York, 1982). Numerous recent observations that various immune effectors can directly or indirectly inhibit growth of tumors has led to renewed interest in this approach to cancer therapy, e.g. Jager, et al., Oncology 2001;60(1):1-7; Renner, et al., Ann Hematol 2000 December;79(12):651-9.

[0274] Four-basic cell types whose function has been associated with antitumor cell immunity and the elimination of tumor cells from the body are: i) B-lymphocytes which secrete immunoglobulins into the blood plasma for identifying and labeling the nonself invader cells; ii) monocytes which secrete the complement proteins that are responsible for lysing and processing the immunoglobulin-coated target invader cells; iii) natural killer lymphocytes having two mechanisms for the destruction of tumor cells, antibody-dependent cellular cytotoxicity and natural killing; and iv) T-lymphocytes possessing antigen-specific receptors and having the capacity to recognize a tumor cell carrying complementary marker molecules (Schreiber, H., 1989, in Fundamental Immunology (ed). W. E. Paul, pp. 923-955).

[0275] Cancer immunotherapy generally focuses on inducing humoral immune responses, cellular immune responses, or both. Moreover, it is well established that induction of CD4⁺ T helper cells is necessary in order to secondarily induce either antibodies or cytotoxic CD8⁺ T cells. Polypeptide antigens that are selective or ideally specific for cancer cells, particularly colon cancer cells, offer a powerful approach for inducing immune responses against colon cancer, and are an important aspect of the present invention.

[0276] Therefore, in further aspects of the present invention, the pharmaceutical compositions described herein may be used to stimulate an immune response against cancer, particularly for the immunotherapy of colon cancer. Within such methods, the pharmaceutical compositions described herein are administered to a patient, typically a warm-blooded animal, preferably a human. A patient may or may not be afflicted with cancer. Pharmaceutical compositions and vaccines may be administered either prior to or following surgical removal of primary tumors and/or treatment such as administration of radiotherapy or conventional chemotherapeutic drugs. As discussed above, administration of the pharmaceutical compositions may be by any suitable method, including administration by intravenous, intraperitoneal, intramuscular, subcutaneous, intranasal, intradermal, anal, vaginal, topical and oral routes.

[0277] Within certain embodiments, immunotherapy may be active immunotherapy, in which treatment relies on the in vivo stimulation of the endogenous host immune system to react against tumors with the administration of immune response-modifying agents (such as polypeptides and polynucleotides as provided herein).

[0278] Within other embodiments, immunotherapy may be passive immunotherapy, in which treatment involves the delivery of agents with established tumor-immune reactivity (such as effector cells or antibodies) that can directly or indirectly mediate antitumor effects and does not necessarily depend on an intact host immune system. Examples of effector cells include T cells as discussed above, T lymphocytes (such as CD8⁺ cytotoxic T lymphocytes and CD4⁺ T-helper tumor-infiltrating lymphocytes), killer cells (such as Natural Killer cells and lymphokine-activated killer cells), B cells and antigen-presenting cells (such as dendritic cells and macrophages) expressing a polypeptide provided herein. T cell receptors and antibody receptors specific for the polypeptides recited herein may be cloned, expressed and transferred into other vectors or effector cells for adoptive immunotherapy. The polypeptides provided herein may also be used to generate antibodies or anti-idiotypic antibodies (as described above and in U.S. Pat. No. 4,918,164) for passive immunotherapy.

[0279] Monoclonal antibodies may be labeled with any of a variety of labels for desired selective usages in detection, diagnostic assays or therapeutic applications (as described in U.S. Pat. Nos. 6,090,365; 6,015,542; 5,843,398; 5,595,721; and 4,708,930, hereby incorporated by reference in their entirety as if each was incorporated individually). In each case, the binding of the labelled monoclonal antibody to the determinant site of the antigen will signal detection or delivery of a particular therapeutic agent to the antigenic determinant on the non-normal cell. A further object of this invention is to provide the specific monoclonal antibody suitably labelled for achieving such desired selective usages thereof.

[0280] Effector cells may generally be obtained in sufficient quantities for adoptive immunotherapy by growth in vitro, as described herein. Culture conditions for expanding single antigen-specific effector cells to several billion in number with retention of antigen recognition in vivo are well known in the art. Such in vitro culture conditions typically use intermittent stimulation with antigen, often in the presence of cytokines (such as IL-2) and non-dividing feeder cells. As noted above, immunoreactive polypeptides as provided herein may be used to rapidly expand antigen-specific T cell cultures in order to generate a sufficient number of cells for immunotherapy. In particular, antigen-presenting cells, such as dendritic, macrophage, monocyte, fibroblast and/or B cells, may be pulsed with immunoreactive polypeptides or transfected with one or more polynucleotides using standard techniques well known in the art. For example, antigen-presenting cells can be transfected with a polynucleotide having a promoter appropriate for increasing expression in a recombinant virus or other expression system. Cultured effector cells for use in therapy must be able to grow and distribute widely, and to survive long term in vivo. Studies have shown that cultured effector cells can be induced to grow in vivo and to survive long term in substantial numbers by repeated stimulation with antigen supplemented with IL-2 (see, for example, Cheever et al., Immunological Reviews 15 7:177, 1997).

[0281] Alternatively, a vector expressing a polypeptide recited herein may be introduced into antigen presenting cells taken from a patient and clonally propagated ex vivo for transplant back into the same patient. Transfected cells may be reintroduced into the patient using any means known in the art, preferably in sterile form by intravenous, intracavitary, intraperitoneal or intratumor administration.

[0282] Routes and frequency of administration of the therapeutic compositions described herein, as well as dosage, will vary from individual to individual, and may be readily established using standard techniques. In general, the pharmaceutical compositions and vaccines may be administered by injection (e.g., intracutaneous, intramuscular, intravenous or subcutaneous), intranasally (e.g., by aspiration) or orally. Preferably, between 1 and 10 doses may be administered over a 52 week period. Preferably, 6 doses are administered, at intervals of 1 month, and booster vaccinations may be given periodically thereafter. Alternate protocols may be appropriate for individual patients. A suitable dose is an amount of a compound that, when administered as described above, is capable of promoting an anti-tumor immune response, and is at least 10-50% above the basal (i.e., untreated) level. Such response can be monitored by measuring the anti-tumor antibodies in a patient or by vaccine-dependent generation of cytolytic effector cells capable of killing the patient's tumor cells in vitro. Such vaccines should also be capable of causing an immune response that leads to an improved clinical outcome (e.g., more frequent remissions, complete or partial or longer disease-free survival) in vaccinated patients as compared to non-vaccinated patients. In general, for pharmaceutical compositions and vaccines comprising one or more polypeptides, the amount of each polypeptide present in a dose ranges from about 25 μg to 5 mg per kg of host. Suitable dose sizes will vary with the size of the patient, but will typically range from about 0.1 mL to about 5 mL.

[0283] In general, an appropriate dosage and treatment regimen provides the active compound(s) in an amount sufficient to provide therapeutic and/or prophylactic benefit. Such a response can be monitored by establishing an improved clinical outcome (e.g., more frequent remissions, complete or partial, or longer disease-free survival) in treated patients as compared to non-treated patients. Increases in preexisting immune responses to a tumor protein generally correlate with an improved clinical outcome. Such immune responses may generally be evaluated using standard proliferation, cytotoxicity or cytokine assays, which may be performed using samples obtained from a patient before and after treatment.

[0284] Cancer Detection And Diagnostic Compositions, Methods and Kits

[0285] In general, a cancer may be detected in a patient based on the presence of one or more colon tumor proteins and/or polynucleotides encoding such proteins in a biological sample (for example, blood, sera, sputum urine and/or tumor biopsies) obtained from the patient. In other words, such proteins may be used as markers to indicate the presence or absence of a cancer such as colon cancer. In addition, such proteins may be useful for the detection of other cancers. The binding agents provided herein generally permit detection of the level of antigen that binds to the agent in the biological sample.

[0286] Polynucleotide primers and probes may be used to detect the level of mRNA encoding a tumor protein, which is also indicative of the presence or absence of a cancer. In general, a tumor sequence should be present at a level that is at least two-fold, preferably three-fold, and more preferably five-fold or higher in tumor tissue than in normal tissue of the same type from which the tumor arose. Expression levels of a particular tumor sequence in tissue types different from that in which the tumor arose are irrelevant in certain diagnostic embodiments since the presence of tumor cells can be confirmed by observation of predetermined differential expression levels, e.g., 2-fold, 5-fold, etc, in tumor tissue to expression levels in normal tissue of the same type.

[0287] Other differential expression patterns can be utilized advantageously for diagnostic purposes. For example, in one aspect of the invention, overexpression of a tumor sequence in tumor tissue and normal tissue of the same type, but not in other normal tissue types, e.g. PBMCs, can be exploited diagnostically. In this case, the presence of metastatic tumor cells, for example in a sample taken from the circulation or some other tissue site different from that in which the tumor arose, can be identified and/or confirmed by detecting expression of the tumor sequence in the sample, for example using RT-PCR analysis. In many instances, it will be desired to enrich for tumor cells in the sample of interest, e.g., PBMCs, using cell capture or other like techniques.

[0288] There are a variety of assay formats known to those of ordinary skill in the art for using a binding agent to detect polypeptide markers in a sample. See, e.g., Harlow and Lane, Antibodies: A Laboratory Manual, Cold Spring Harbor Laboratory, 1988. In general, the presence or absence of a cancer in a patient may be determined by (a) contacting a biological sample obtained from a patient with a binding agent; (b) detecting in the sample a level of polypeptide that binds to the binding agent; and (c) comparing the level of polypeptide with a predetermined cut-off value.

[0289] In a preferred embodiment, the assay involves the use of binding agent immobilized on a solid support to bind to and remove the polypeptide from the remainder of the sample. The bound polypeptide may then be detected using a detection reagent that contains a reporter group and specifically binds to the binding agent/polypeptide complex. Such detection reagents may comprise, for example, a binding agent that specifically binds to the polypeptide or an antibody or other agent that specifically binds to the binding agent, such as an anti-immunoglobulin, protein G, protein A or a lectin. Alternatively, a competitive assay may be utilized, in which a polypeptide is labeled with a reporter group and allowed to bind to the immobilized binding agent after incubation of the binding agent with the sample. The extent to which components of the sample inhibit the binding of the labeled polypeptide to the binding agent is indicative of the reactivity of the sample with the immobilized binding agent. Suitable polypeptides for use within such assays include full length colon tumor proteins and polypeptide portions thereof to which the binding agent binds, as described above.

[0290] The solid support may be any material known to those of ordinary skill in the art to which the tumor protein may be attached. For example, the solid support may be a test well in a microtiter plate or a nitrocellulose or other suitable membrane. Alternatively, the support may be a bead or disc, such as glass, fiberglass, latex or a plastic material such as polystyrene or polyvinylchloride. The support may also be a magnetic particle or a fiber optic sensor, such as those disclosed, for example, in U.S. Pat. No. 5,359,681. The binding agent may be immobilized on the solid support using a variety of techniques known to those of skill in the art, which are amply described in the patent and scientific literature. In the context of the present invention, the term “immobilization” refers to both noncovalent association, such as adsorption, and covalent attachment (which may be a direct linkage between the agent and functional groups on the support or may be a linkage by way of a cross-linking agent). Immobilization by adsorption to a well in a microtiter plate or to a membrane is preferred. In such cases, adsorption may be achieved by contacting the binding agent, in a suitable buffer, with the solid support for a suitable amount of time. The contact time varies with temperature, but is typically between about 1 hour and about 1 day. In general, contacting a well of a plastic microtiter plate (such as polystyrene or polyvinylchloride) with an amount of binding agent ranging from about 10 ng to about 10 μg, and preferably about 100 ng to about 1 μg, is sufficient to immobilize an adequate amount of binding agent.

[0291] Covalent attachment of binding agent to a solid support may generally be achieved by first reacting the support with a bifunctional reagent that will react with both the support and a functional group, such as a hydroxyl or amino group, on the binding agent. For example, the binding agent may be covalently attached to supports having an appropriate polymer coating using benzoquinone or by condensation of an aldehyde group on the support with an amine and an active hydrogen on the binding partner (see, e.g., Pierce Immunotechnology Catalog and Handbook, 1991, at A12-A13).

[0292] In certain embodiments, the assay is a two-antibody sandwich assay. This assay may be performed by first contacting an antibody that has been immobilized on a solid support, commonly the well of a microtiter plate, with the sample, such that polypeptides within the sample are allowed to bind to the immobilized antibody. Unbound sample is then removed from the immobilized polypeptide-antibody complexes and a detection reagent (preferably a second antibody capable of binding to a different site on the polypeptide) containing a reporter group is added. The amount of detection reagent that remains bound to the solid support is then determined using a method appropriate for the specific reporter group.

[0293] More specifically, once the antibody is immobilized on the support as described above, the remaining protein binding sites on the support are typically blocked. Any suitable blocking agent known to those of ordinary skill in the art, such as bovine serum albumin or Tween 20™ (Sigma Chemical Co., St. Louis, Mo.). The immobilized antibody is then incubated with the sample, and polypeptide is allowed to bind to the antibody. The sample may be diluted with a suitable diluent, such as phosphate-buffered saline (PBS) prior to incubation. In general, an appropriate contact time (i.e., incubation time) is a period of time that is sufficient to detect the presence of polypeptide within a sample obtained from an individual with colon cancer at least about 95% of that achieved at equilibrium between bound and unbound polypeptide. Those of ordinary skill in the art will recognize that the time necessary to achieve equilibrium may be readily determined by assaying the level of binding that occurs over a period of time. At room temperature, an incubation time of about 30 minutes is generally sufficient.

[0294] Unbound sample may then be removed by washing the solid support with an appropriate buffer, such as PBS containing 0.1% Tween 20™. The second antibody, which contains a reporter group, may then be added to the solid support. Preferred reporter groups include those groups recited above.

[0295] The detection reagent is then incubated with the immobilized antibody-polypeptide complex for an amount of time sufficient to detect the bound polypeptide. An appropriate amount of time may generally be determined by assaying the level of binding that occurs over a period of time. Unbound detection reagent is then removed and bound detection reagent is detected using the reporter group. The method employed for detecting the reporter group depends upon the nature of the reporter group. For radioactive groups, scintillation counting or autoradiographic methods are generally appropriate. Spectroscopic methods may be used to detect dyes, luminescent groups and fluorescent groups. Biotin may be detected using avidin, coupled to a different reporter group (commonly a radioactive or fluorescent group or an enzyme). Enzyme reporter groups may generally be detected by the addition of substrate (generally for a specific period of time), followed by spectroscopic or other analysis of the reaction products.

[0296] To determine the presence or absence of a cancer, such as colon cancer, the signal detected from the reporter group that remains bound to the solid support is generally compared to a signal that corresponds to a predetermined cut-off value. In one preferred embodiment, the cut-off value for the detection of a cancer is the average mean signal obtained when the immobilized antibody is incubated with samples from patients without the cancer. In general, a sample generating a signal that is three standard deviations above the predetermined cut-off value is considered positive for the cancer. In an alternate preferred embodiment, the cut-off value is determined using a Receiver Operator Curve, according to the method of Sackett et al., Clinical Epidemiology: A Basic Science for Clinical Medicine, Little Brown and Co., 1985, p. 106-7. Briefly, in this embodiment, the cut-off value may be determined from a plot of pairs of true positive rates (i.e., sensitivity) and false positive rates (100%-specificity) that correspond to each possible cut-off value for the diagnostic test result. The cut-off value on the plot that is the closest to the upper left-hand corner (i.e., the value that encloses the largest area) is the most accurate cut-off value, and a sample generating a signal that is higher than the cut-off value determined by this method may be considered positive. Alternatively, the cut-off value may be shifted to the left along the plot, to minimize the false positive rate, or to the right, to minimize the false negative rate. In general, a sample generating a signal that is higher than the cut-off value determined by this method is considered positive for a cancer.

[0297] In a related embodiment, the assay is performed in a flow-through or strip test format, wherein the binding agent is immobilized on a membrane, such as nitrocellulose. In the flow-through test, polypeptides within the sample bind to the immobilized binding agent as the sample passes through the membrane. A second, labeled binding agent then binds to the binding agent-polypeptide complex as a solution containing the second binding agent flows through the membrane. The detection of bound second binding agent may then be performed as described above. In the strip test format, one end of the membrane to which binding agent is bound is immersed in a solution containing the sample. The sample migrates along the membrane through a region containing second binding agent and to the area of immobilized binding agent. Concentration of second binding agent at the area of immobilized antibody indicates the presence of a cancer. Typically, the concentration of second binding agent at that site generates a pattern, such as a line, that can be read visually. The absence of such a pattern indicates a negative result. In general, the amount of binding agent immobilized on the membrane is selected to generate a visually discernible pattern when the biological sample contains a level of polypeptide that would be sufficient to generate a positive signal in the two-antibody sandwich assay, in the format discussed above. Preferred binding agents for use in such assays are antibodies and antigen-binding fragments thereof. Preferably, the amount of antibody immobilized on the membrane ranges from about 25 ng to about 1 μg, and more preferably from about 50 ng to about 500 ng. Such tests can typically be performed with a very small amount of biological sample.

[0298] Of course, numerous other assay protocols exist that are suitable for use with the tumor proteins or binding agents of the present invention. The above descriptions are intended to be exemplary only. For example, it will be apparent to those of ordinary skill in the art that the above protocols may be readily modified to use tumor polypeptides to detect antibodies that bind to such polypeptides in a biological sample. The detection of such tumor protein specific antibodies may correlate with the presence of a cancer.

[0299] A cancer may also, or alternatively, be detected based on the presence of T cells that specifically react with a tumor protein in a biological sample. Within certain methods, a biological sample comprising CD4⁺ and/or CD8⁺ T cells isolated from a patient is incubated with a tumor polypeptide, a polynucleotide encoding such a polypeptide and/or an APC that expresses at least an immunogenic portion of such a polypeptide, and the presence or absence of specific activation of the T cells is detected. Suitable biological samples include, but are not limited to, isolated T cells. For example, T cells may be isolated from a patient by routine techniques (such as by Ficoll/Hypaque density gradient centrifugation of peripheral blood lymphocytes). T cells may be incubated in vitro for 2-9 days (typically 4 days) at 37° C. with polypeptide (e.g., 5-25 μg/ml). It may be desirable to incubate another aliquot of a T cell sample in the absence of tumor polypeptide to serve as a control. For CD4⁺ T cells, activation is preferably detected by evaluating proliferation of the T cells. For CD8⁺ T cells, activation is preferably detected by evaluating cytolytic activity. A level of proliferation that is at least two fold greater and/or a level of cytolytic activity that is at least 20% greater than in disease-free patients indicates the presence of a cancer in the patient.

[0300] As noted above, a cancer may also, or alternatively, be detected based on the level of mRNA encoding a tumor protein in a biological sample. For example, at least two oligonucleotide primers may be employed in a polymerase chain reaction (PCR) based assay to amplify a portion of a tumor cDNA derived from a biological sample, wherein at least one of the oligonucleotide primers is specific for (i.e., hybridizes to) a polynucleotide encoding the tumor protein. The amplified cDNA is then separated and detected using techniques well known in the art, such as gel electrophoresis.

[0301] Similarly, oligonucleotide probes that specifically hybridize to a polynucleotide encoding a tumor protein may be used in a hybridization assay to detect the presence of polynucleotide encoding the tumor protein in a biological sample.

[0302] To permit hybridization under assay conditions, oligonucleotide primers and probes should comprise an oligonucleotide sequence that has at least about 60%, preferably at least about 75% and more preferably at least about 90%, identity to a portion of a polynucleotide encoding a tumor protein of the invention that is at least 10 nucleotides, and preferably at least 20 nucleotides, in length. Preferably, oligonucleotide primers and/or probes hybridize to a polynucleotide encoding a polypeptide described herein under moderately stringent conditions, as defined above. Oligonucleotide primers and/or probes which may be usefully employed in the diagnostic methods described herein preferably are at least 10-40 nucleotides in length. In a preferred embodiment, the oligonucleotide primers comprise at least 10 contiguous nucleotides, more preferably at least 15 contiguous nucleotides, of a DNA molecule having a sequence as disclosed herein. Techniques for both PCR based assays and hybridization assays are well known in the art (see, for example, Mullis et al., Cold Spring Harbor Symp. Quant. Biol., 51:263, 1987; Erlich ed., PCR Technology, Stockton Press, NY, 1989).

[0303] One preferred assay employs RT-PCR, in which PCR is applied in conjunction with reverse transcription. Typically, RNA is extracted from a biological sample, such as biopsy tissue, and is reverse transcribed to produce cDNA molecules. PCR amplification using at least one specific primer generates a cDNA molecule, which may be separated and visualized using, for example, gel electrophoresis. Amplification may be performed on biological samples taken from a test patient and from an individual who is not afflicted with a cancer. The amplification reaction may be performed on several dilutions of cDNA spanning two orders of magnitude. A two-fold or greater increase in expression in several dilutions of the test patient sample as compared to the same dilutions of the non-cancerous sample is typically considered positive.

[0304] In another aspect of the present invention, cell capture technologies may be used in conjunction, with, for example, real-time PCR to provide a more sensitive tool for detection of metastatic cells expressing colon tumor antigens. Detection of colon cancer cells in biological samples, e.g., bone marrow samples, peripheral blood, and small needle aspiration samples is desirable for diagnosis and prognosis in colon cancer patients.

[0305] Immunomagnetic beads coated with specific monoclonal antibodies to surface cell markers, or tetrameric antibody complexes, may be used to first enrich or positively select cancer cells in a sample. Various commercially available kits may be used, including Dynabeads® Epithelial Enrich (Dynal Biotech, Oslo, Norway), StemSep™ (StemCell Technologies, Inc., Vancouver, BC), and RosetteSep (StemCell Technologies). A skilled artisan will recognize that other methodologies and kits may also be used to enrich or positively select desired cell populations. Dynabeads® Epithelial Enrich contains magnetic beads coated with mAbs specific for two glycoprotein membrane antigens expressed on normal and neoplastic epithelial tissues. The coated beads may be added to a sample and the sample then applied to a magnet, thereby capturing the cells bound to the beads. The unwanted cells are washed away and the magnetically isolated cells eluted from the beads and used in further analyses.

[0306] RosetteSep can be used to enrich cells directly from a blood sample and consists of a cocktail of tetrameric antibodies that targets a variety of unwanted cells and crosslinks them to glycophorin A on red blood cells (RBC) present in the sample, forming rosettes. When centrifuged over Ficoll, targeted cells pellet along with the free RBC. The combination of antibodies in the depletion cocktail determines which cells will be removed and consequently which cells will be recovered. Antibodies that are available include, but are not limited to: CD2, CD3, CD4, CD5, CD8, CD10, CD11b, CD14, CD15, CD16, CD19, CD20, CD24, CD25, CD29, CD33, CD34, CD36, CD38, CD41, CD45, CD45RA, CD45RO, CD56, CD66B, CD66e, HLA-DR, IgE, and TCRαβ.

[0307] Additionally, it is contemplated in the present invention that mAbs specific for colon tumor antigens can be generated and used in a similar manner. For example, mAbs that bind to tumor-specific cell surface antigens may be conjugated to magnetic beads, or formulated in a tetrameric antibody complex, and used to enrich or positively select metastatic colon tumor cells from a sample. Once a sample is enriched or positively selected, cells may be lysed and RNA isolated. RNA may then be subjected to RT-PCR analysis using colon tumor-specific primers in a real-time PCR assay as described herein. One skilled in the art will recognize that enriched or selected populations of cells may be analyzed by other methods (e.g. in situ hybridization or flow cytometry).

[0308] In another embodiment, the compositions described herein may be used as markers for the progression of cancer. In this embodiment, assays as described above for the diagnosis of a cancer may be performed over time, and the change in the level of reactive polypeptide(s) or polynucleotide(s) evaluated. For example, the assays may be performed every 24-72 hours for a period of 6 months to 1 year, and thereafter performed as needed. In general, a cancer is progressing in those patients in whom the level of polypeptide or polynucleotide detected increases over time. In contrast, the cancer is not progressing when the level of reactive polypeptide or polynucleotide either remains constant or decreases with time.

[0309] Certain in vivo diagnostic assays may be performed directly on a tumor. One such assay involves contacting tumor cells with a binding agent. The bound binding agent may then be detected directly or indirectly via a reporter group. Such binding agents may also be used in histological applications. Alternatively, polynucleotide probes may be used within such applications.

[0310] As noted above, to improve sensitivity, multiple tumor protein markers may be assayed within a given sample. It will be apparent that binding agents specific for different proteins provided herein may be combined within a single assay. Further, multiple primers or probes may be used concurrently. The selection of tumor protein markers may be based on routine experiments to determine combinations that results in optimal sensitivity. In addition, or alternatively, assays for tumor proteins provided herein may be combined with assays for other known tumor antigens.

[0311] The present invention further provides kits for use within any of the above diagnostic methods. Such kits typically comprise two or more components necessary for performing a diagnostic assay. Components may be compounds, reagents, containers and/or equipment. For example, one container within a kit may contain a monoclonal antibody or fragment thereof that specifically binds to a tumor protein. Such antibodies or fragments may be provided attached to a support material, as described above. One or more additional containers may enclose elements, such as reagents or buffers, to be used in the assay. Such kits may also, or alternatively, contain a detection reagent as described above that contains a reporter group suitable for direct or indirect detection of antibody binding.

[0312] Alternatively, a kit may be designed to detect the level of mRNA encoding a tumor protein in a biological sample. Such kits generally comprise at least one oligonucleotide probe or primer, as described above, that hybridizes to a polynucleotide encoding a tumor protein. Such an oligonucleotide may be used, for example, within a PCR or hybridization assay. Additional components that may be present within such kits include a second oligonucleotide and/or a diagnostic reagent or container to facilitate the detection of a polynucleotide encoding a tumor protein.

[0313] The following Examples are offered by way of illustration and not by way of limitation.

### EXAMPLES

### Example 1

### Identification Of Colon Tumor Protein cDNAs

[0314] This Example illustrates the identification of cDNA molecules encoding colon tumor proteins using PCR-based cDNA subtraction methodology.

[0315] A modification of the Clontech (Palo Alto, Calif.) PCR-Selec™ cDNA subtraction methodology was employed to obtain cDNA populations enriched in cDNAs derived from transcripts that are differentially expressed in colon tumor samples. By this methodology, mRNA populations were isolated from colon tumor and metastatic tumor samples (“tester” mRNA) as well as from normal tissues, such as brain, pancreas, bone marrow, liver, heart, lung, stomach and small intestine (“driver” mRNA). From the tester and driver mRNA populations, cDNA was synthesized by standard methodology. See, e.g., Ausubel, F. M. et al., Short Protocols in Molecular Biology (4^{th} ed., John Wiley and Sons, Inc., 1999).

[0316] The subtraction steps were performed using a PCR-based protocol that was modified to generate fragments larger than would be derived by the Clontech methodology. By this modified protocol, the tester and driver cDNAs were separately digested with five restriction endonucleases (Mlu I, Msc I, Pvu II, Sal I and Stu I) each of which recognize a unique 6-base pair nucleotide sequence. This digestion resulted in an average cDNA size of 600 bp, rather than the average size of 300 bp that results from digestion with Rsa I according to the Clontech methodology. This modification did not affect the ultimate subtraction efficiency.

[0317] Following the restriction digestion, adapter oligonucleotides having unique nucleotide sequences were ligated onto the 5′ ends of the tester cDNAs; adapter oligonucleotides were not ligated onto the driver cDNAs. The tester and driver cDNAs were subsequently hybridized one to the other using an excess of driver cDNA. This hybridization step resulted in populations of (a) unhybridized tester cDNAs, (b) tester cDNAs hybridized to other tester cDNAs, (c) tester cDNAs hybridized to driver cDNAs, (d) unhybridized driver cDNAs and (e) driver cDNAs hybridized to driver cDNAs.

[0318] Tester cDNAs hybridized to other tester cDNAs were selectively amplified by a polymerase chain reaction (PCR) employing primers complementary to the ligated adapters. Because only tester cDNAs were ligated to adapter sequences, neither unhybridized tester or driver cDNAs, tester cDNAs hybridized to driver cDNAs nor driver cDNAs hybridized to driver cDNAs were amplified using adapter specific oligonucleotides. The PCR amplified tester cDNAs were cloned into the pCR2.1 plasmid vector (Invitrogen; Carlsbad, Calif.) to create libraries enriched in differentially expressed colon tumor antigen and colon metastatic tumor antigen specific cDNAs.

[0319] Three thousand clones from the pCR2.1 tumor antigen cDNA libraries were randomly selected and used to obtain clones for microarray analysis and nucleotide sequencing. The cDNA insert from each pCR2.1 clone was PCR amplified as follows. Briefly, 0.5 111 of glycerol stock solution was added to 99.5 μl of PCR mix containing 80 μl H₂O, 10 μl 10× PCR Buffer, 6 μl MgCl₂, 1 μl 10 mM dNTPs, 1 μl 100 mM M13 forward primer (CACGACGTTGTAAAACGACGG; SEQ ID NO:2236), 1 μl 100 mM M13 reverse primer (CACAGGAAACAGCTATGACC; SEQ ID NO:2237), and 0.5 μl 5 u/ml Taq DNA polymerase. The M13 forward and reverse primers used herein were obtained from Operon Technologies (Alameda, Calif.). The PCR amplification was performed for thirty cycles under the following conditions: 95° C. for 5 minutes, 92° C. for 30 seconds, 57° C. for 40 seconds, 75° C. for 2 minutes and 75° C. for 5 minutes.

[0320] mRNA expression levels for representative clones were determined using microarray technology in colon tumor tissues (n=25), normal colon tissues (n=6), kidney, lung, liver, brain, heart, esophagus, small intestine, stomach, pancreas, adrenal gland, salivary gland, resting PBMC, activated PBMC, bone marrow, dendritic cells, spinal cord, blood vessels, skeletal muscle, skin, breast and fetal tissues. An exemplary methodology for performing the microarray analysis is described in Schena et al., Science 270:467-470. The number of tissue samples tested in each case was one (n=1), except where specifically noted above; additionally, all the above-mentioned tissues were derived from humans.

[0321] The PCR amplification products were dotted onto slides in an array format, with each product occupying a unique location in the array. mRNA was extracted from the tissue sample to be tested, and fluorescent-labeled cDNA probes were generated by reverse transcription, according to standard methodology, in the presence of fluorescent nucleotides Ψ5 and Ψ3. See, e.g., Ausubel, et al., supra for exemplary reaction conditions for performing the reverse transcription reaction; Ψ5 and Ψ3 fluorescent labeled nucleotides may be obtained, e.g., from Amersham Pharmacia (Uppsala, Sweden) or NEN® Life Science Products, Inc. (Boston, Mass.). The microarrays were probed with the fluorescent-labeled cDNAs, the slides were scanned and fluorescence intensity was measured. Genetic MicroSystems instrumentation for preparing the cDNA microarrays and for measuring fluorescence intensity is available from Affymetrix (Santa Clara, Calif.).

[0322] An elevated fluorescence intensity in a microarray sector probed with cDNA probes obtained from a colon tumor or colon metastatic tumor tissue as compared to the fluorescence intensity in the same sector probed with cDNA probes obtained from a normal tissue indicates a tumor antigen gene that is differentially expressed in colon tumor or colon metastatic tumor tissue.

[0323] Clones disclosed herein as SEQ ID NO:1-2231 were identified from the PCR subtracted differential colon tumor and colon metastatic tumor cDNA libraries and showed at least two-fold overexpression in colon tumors by the microarray based methodology.

### Example 2

### Full-Length Sequence Of C931 P Colon Tumor Protein cDNA

[0324] This example discloses the full-length sequence of the C931P colon tumor protein cDNA by LifeSeq Gold Datamining.

[0325] The original sequence for C931P (disclosed herein as SEQ ID NO:1861) was used as a query sequence in a BlastN search of the LifeSeq Gold database (December 2000 release). C931P matched a single LifeSeq Gold gene bin (#475113) that contained 5 template sequences. The 5 template sequences were aligned with C931P in order to determine a consensus, full-length cDNA sequence for C931P that encodes a 371 amino acid ORF (SEQ ID NO:2232 and 2235, respectively). Multiple splice variants were discovered in the LifeSeq Gold database. Two of these splice variants are disclosed herein, one of which encodes the 371 amino acid open reading frame.

[0326] The original clone isolated for C931P (443 bp) was used as a query sequence in a BlastN search of the LifeSeq Gold “LGtemplatesSep2000” search database. This search was done using the LifeSeq gold Web interface provided by Incyte. There was an identical match to a single LifeSeq Gold template sequence, number 475113.7. Then, information regarding gene bin 475113 (to which the 475113.7 sequence belongs) was obtained from the LifeSeq Gold database. This 475113 gene bin consisted of 5 template sequences and 176 clones. The 5 template sequences were aligned with the C931P sequence using the DNAStar Seqman program. Alignment of these sequences showed that each of the 5 template sequences represented an alternative splice form—each sequence had a unique multiple base pair deletion relative to the other sequences. This multiple sequence alignment was used to derive a single sequence that should represent the mature mRNA for the C931P gene, as well as a single open reading frame. This predicted mature mRNA sequence was obtained by incorporating all multiple base pair deletions that were present in the 5 template sequences. The C931P original isolate sequence corresponds to a portion of the gene that is deleted in the predicted fully processed mRNA sequence. Thus, herein 3 sequences obtained from LifeSeq are disclosed. One corresponds to a predicted partially spliced form of the gene (SEQ ID NO:2233) that will align with the C931P original isolate sequence. The second corresponds to the predicted, fully processed mRNA sequence (SEQ ID NO:2232) that will not align with the C931P original isolate sequence. The third sequence corresponds to the predicted coding portion of the sequence only (SEQ ID NO:2234). A single protein sequence is dislosed herein—the predicted C931P full-length protein sequence (SEQ ID NO:2235).

### Example 3

### mRNA Expression Analysis of the C931P Colon Tumor Antigen Using Real-Time PCR

[0327] The colon tumor candidate gene C931P (full length cDNA set forth in SEQ ID NO:2232) was analyzed by real-time PCR, as described below, using the short and extended colon panel. This gene was found to have increased expression in about 50% of colon tumors. Some expression was also observed in lymph nodes and thymus.

[0328] The first-strand cDNA to be used in the quantitative real-time PCR was synthesized from 20μg of total RNA that had been treated with DNase I (Amplification Grade, Gibco BRL Life Technology, Gaitherburg, Md.), using Superscript Reverse Transcriptase (RT) (Gibco BRL Life Technology, Gaitherburg, Md.). Real-time PCR was performed with a GeneAmp™ 5700 sequence detection system (PE Biosystems, Foster City, Calif.). The 5700 system uses SYBR™ green, a fluorescent dye that only intercalates into double stranded DNA, and a set of gene-specific forward and reverse primers. The increase in fluorescence is monitored during the whole amplification process. The optimal concentration of primers was determined using a checkerboard approach and a pool of cDNAs from breast tumors was used in this process.

[0329] The PCR reaction was performed in 25 μl volumes that include 2.5% of SYBR green buffer, 2μl of cDNA template and 2.5%1 each of the forward and reverse primers for the gene of interest. The cDNAs used for RT reactions were diluted 1:10 for each gene of interest and 1:100 for the β-actin control. In order to quantitate the amount of specific cDNA (and hence initial mRNA) in the sample, a standard curve is generated for each run using the plasmid DNA containing the gene of interest. Standard curves were generated using the Ct values determined in the real-time PCR which were related to the initial cDNA concentration used in the assay. Standard dilution ranging from 20-2×10⁶ copies of the gene of interest was used for this purpose. In addition, a standard curve was generated for β-actin ranging from 200fg-2000fg. This enabled standardization of the initial RNA content of a tissue sample to the amount of β-actin for comparison purposes. The mean copy number for each group of tissues tested was normalized to a constant amount of β-actin, allowing the evaluation of the over-expression levels seen with each of the genes.

### Example 4

### Bioinformatic and Extended Real-Time PCR Analysis of C931P

[0330] The colon tumor antigen, C931P (SEQ ID NOs:1861, 2232, 2234, and 2235 and 2239)), was further analyzed by real-time PCR as described in Example 3, and using bioinformatics. Real-time PCR expression profiling on an extended panel of samples showed that this gene is overexpressed by at least two-fold in the majority of colon tumor samples tested as compared to normal colon samples. Overexpression was also seen in normal thymus. Lower levels of expression were observed in esophagus and small intestine. No expression was observed in other normal tissues. A search of the sequence against Genbank showed that C931P has similarity to 2 cDNA clones including a potential c-Myc target JP01 gene.

### Example 5

### Expression IN E. coli of Recombinant C931P

[0331] The colon tumor antigen, C931P (full-length cDNA of the coding region and predicted protein sequence set forth in SEQ ID NOs:2234 and 2235 and 2239, respectively) was cloned into the pET28b expression vector as described in detail below. The sequence of the resulting construct is set forth in SEQ ID NO:2238 and the predicted amino acid sequence is set forth in SEQ ID NO:2239. The recombinant protein was then expressed in E. coli as described below.

[0332] The plasmid C931P/pCR4-TOPO was digested with Nde I and Not I. The insert C931P was purified and then ligated into the His Tag containing pET28b vector, which was linearized with the same two restriction enzymes and dephosphorylated. The ligation mixture was transformed into competent E. coli cells with the following standard protocol: thaw the competent E. coli cells (25 μl) on ice, add DNA (or ligation mixture), mix and let sit on ice for 5 min. The E. coli cells were then heat-shocked at 42° C. for 30 seconds, and put back on ice for 2 minutes. 100 μl of SOC was added to the E. coli and was grown at 37° C. for 1 hour. The culture was then plated on LB (+Kan) and grown overnight at 37° C. The following day, several colonies were randomly picked for plasmid miniprep. The plasmids were screened by restriction enzyme analysis and further confirmed by DNA sequencing. All 5 clones (Clone ID Nos: 90796-90780) were confirmed by DNA sequence.

[0333] In order to determine the optimal protein expression conditions, the expression construct was transformed into different hosts, then mini-induction screening was done by varying temperature, culture media, and/or IPTG concentrations after the inducer IPTG was added to the mid-log phase culture. Then the recombinant protein expression was screened by SDS-PAGE and/or Western blot analysis. The optimal conditions for expression of C931P were as follows: 100 ml 2× YS (+Kan+Cam) was inoculated from glycerol stock of C931P in Tuner (DE3) pLysS host cells and grown overnight at 37° C. The following day, the culture was diluted 25 ml overnight culture into 1 liter of new media. This was grown at 37° C. until the OD was 0.6-0.8. An aliquot was removed for T0 time point sample, the IPTG was added at 1 mM concentration and the culture grown for an additional 3 hours at 37° C. Cells were pelleted and stored at −70° C. until purification. Western analysis with an anti Histag antibody confirmed production of C931P. Both Coomassie staining of the SDS PAGE gel and Western analysis confirmed production of the C931P.

[0334] C931P has a predicted Molecular Weight of 44735.57 Daltons, 391 Amino Acids, 71 Strongly Basic (+) Amino Acids (K,R), 48 Strongly Acidic (−) Amino Acids (D,E), 87 Hydrophobic Amino Acids (A,I,L,F,W,V), 116 Polar Amino Acids (N,C,Q,S,T,Y), an isolectric point of 9.530, and a charge of 24.802 at PH 7.0.

### Example 6

### Peptide Priming of T-Helper Lines

[0335] Generation of CD4⁺ T helper lines and identification of peptide epitopes derived from tumor-specific antigens that are capable of being recognized by CD4⁺ T cells in the context of HLA class II molecules, is carried out as follows:

[0336] Fifteen-mer peptides overlapping by 10 amino acids, derived from a tumor-specific antigen, are generated using standard procedures. Dendritic cells (DC) are derived from PBMC of a normal donor using GM-CSF and IL-4 by standard protocols. CD4⁺ T cells are generated from the same donor as the DC using MACS beads (Miltenyi Biotec, Auburn, Calif.) and negative selection. DC are pulsed overnight with pools of the 15-mer peptides, with each peptide at a final concentration of 0.25 μg/ml. Pulsed DC are washed 4 and plated at 1×10⁴ cells/well of 96-well V-bottom plates and purified CD4⁺ T cells are added at 1×10⁵/well. Cultures are supplemented with 60 ng/ml IL-6 and 10 ng/ml IL-12 and incubated at 37° C. Cultures are restimulated as above on a weekly basis using DC generated and pulsed as above as antigen presenting cells, supplemented with 5 ng/ml IL-7 and 10 U/ml IL-2. Following 4 in vitro stimulation cycles, resulting CD4⁺ T cell lines (each line corresponding to one well) are tested for specific proliferation and cytokine production in response to the stimulating pools of peptide with an irrelevant pool of peptides used as a control.

### Example 7

### Generation of Tumor-Specific CTL Lines Using in vitro Whole-Gene Priming

[0337] Using in vitro whole-gene priming with tumor antigen-vaccinia infected DC (see, for example, Yee et al, The Journal of Immunology, 157(9):4079-86, 1996), human CTL lines are derived that specifically recognize autologous fibroblasts transduced with a specific tumor antigen, as determined by interferon-γ ELISPOT analysis. Specifically, dendritic cells (DC) are differentiated from monocyte cultures derived from PBMC of normal human donors by growing for five days in RPMI medium containing 10% human serum, 50 ng/ml human GM-CSF and 30 ng/ml human IL-4. Following culture, DC are infected overnight with tumor antigen-recombinant vaccinia virus at a multiplicity of infection (M.O.I) of five, and matured overnight by the addition of 3 μg/ml CD40 ligand. Virus is then inactivated by UV irradiation. CD8+ T cells are isolated using a magnetic bead system, and priming cultures are initiated using standard culture techniques. Cultures are restimulated every 7-10 days using autologous primary fibroblasts retrovirally transduced with previously identified tumor antigens. Following four stimulation cycles, CD8+ T cell lines are identified that specifically produce interferon-γ when stimulated with tumor antigen-transduced autologous fibroblasts. Using a panel of HLA-mismatched B-LCL lines transduced with a vector expressing a tumor antigen, and measuring interferon-γ production by the CTL lines in an ELISPOT assay, the HLA restriction of the CTL lines is determined.

### Example 8

### Generation and Characterization of Anti-Tumor Antigen Monoclonal Antibodies

[0338] Mouse monoclonal antibodies are raised against E. coli derived tumor antigen proteins as follows: Mice are immunized with Complete Freund's Adjuvant (CFA) containing 50 μg recombinant tumor protein, followed by a subsequent intraperitoneal boost with Incomplete Freund's Adjuvant (IFA) containing 10 μg recombinant protein. Three days prior to removal of the spleens, the mice are immunized intravenously with approximately 50μg of soluble recombinant protein. The spleen of a mouse with a positive titer to the tumor antigen is removed, and a single-cell suspension made and used for fusion to SP2/O myeloma cells to generate B cell hybridomas. The supernatants from the hybrid clones are tested by ELISA for specificity to recombinant tumor protein, and epitope mapped using peptides that spanned the entire tumor protein sequence. The mAbs are also tested by flow cytometry for their ability to detect tumor protein on the surface of cells stably transfected with the cDNA encoding the tumor protein.

### Example 9

### Synthesis of Polypeptides

[0339] This Example discloses an exemplary methodology for the preparation of colon tumor proteins.

[0340] Polypeptides may be synthesized on a Perkin Elmer/Applied Biosystems Division 430A peptide synthesizer using FMOC chemistry with HPTU (0-Benzotriazole-N,N,N′,N′-tetramethyluronium hexafluorophosphate) activation. A Gly-Cys-Gly sequence may be attached to the amino terminus of the peptide to provide a method of conjugation, binding to an immobilized surface, or labeling of the peptide. Cleavage of the peptides from the solid support may be carried out using the following cleavage mixture: trifluoroacetic acid:ethanedithiol:thioanisole:water:phenol (40:1:2:2:3). After cleaving for 2 hours, the peptides may be precipitated in cold methyl-t-butyl-ether. The peptide pellets may then be dissolved in water containing 0.1% trifluoroacetic acid (TFA) and lyophilized prior to purification by C18 reverse phase HPLC. A gradient of 0%-60% acetonitrile (containing 0.1% TFA) in water (containing 0.1% TFA) may be used to elute the peptides. Following lyophilization of the pure fractions, the peptides may be characterized using electrospray or other types of mass spectrometry and by amino acid analysis.

[0341] From the foregoing it will be appreciated that, although specific embodiments of the invention have been described herein for purposes of illustration, various modifications may be made without deviating from the spirit and scope of the invention. Accordingly, the invention is not limited except as by the appended claims.

The application's sequence listing, which the Patent Office published only in electronic form, follows.

SEQUENCE LISTING (2239 sequences)

SEQ ID NO: 1 - DNA, 579 bp, Homo sapiens
  misc_feature 454, 469, 558: n = A,T,C or G
acttcagttggtgcacaaaatactgtcatttgctcaaagctggctgccaaatgtttggtgatgaaggcagaaatgaatggctcaaaacttgggagaagagcaaaacctgaaggggccctccagaacaatgatgggctttatgatcctgactgcgatgagagcgggctctttaaggccaagcagtgcaacggcacctccatgtgctggtgtgtgaacactgctggggtcagaagaacagacaaggacactgaaataacctgctctgagcgagtgagaacctactggatcatcattgaactaaaacacaaagcaagagaaaaaccttatgatagtaaaagtttgcggactgcacttcagaaggagatcacaacgcgttatcaactggatccaaaatttatcacgagtattttgtatgagaataatgttatcactattgatctggttcaaaattctnctcaaaaaaactcanaatgatgttggacatagctgatggtggcttattatttttgaaaaagatgttaaaggtgaatccttgtttcattctagaaaatggacctnacagtaaatggggaacaactg

SEQ ID NO: 2 - DNA, 520 bp, Homo sapiens
  misc_feature 380, 487: n = A,T,C or G
acaaaccaagagcttttacagatccagaatttattagtttaaaatgcaggtgaacttttttttgcgtttggtttacttgtctgtcaaatgtttccttaaacatgaaactgaataaggagaagagtatttttaacacttaaatttcttggcaaattttaaaacattttttagtctgtaatacactccacttgaagcacttaagtcttccttaaatgacttttcttaagtaatgatactgtgtgttttcccaaagcacttttaaaaaaatttttataaattactatctgttgaaaaggtgtccttttcctttcttctagtatttttttcttaccaaaattcactaatcttgaatgtttgtgatattaaattccaaaatgcangaatacttgactcatttaaagctaaaattttgttaactgatttcaattataattgtaatggatttttttgactttgtaatggattctttttcatcaaaaaagccttnattttttttatctatgtggaaaacacaataaaa

SEQ ID NO: 3 - DNA, 177 bp, Homo sapiens
  misc_feature 9, 60, 61: n = A,T,C or G
gtactttcngaagatgaaatatttataatgagttatggaaacaatgttttagaaatgttnntcttggtgtaatttaatgcagatttttacctcaattttgttaaaaaacttgataatttgatccctccatctatttaatatttaatattttcagattctagagtatttaaaatttaa

SEQ ID NO: 4 - DNA, 223 bp, Homo sapiens
  misc_feature 18, 19, 64, 158, 167, 172, 173: n = A,T,C or G
acaggacaccaccccganntgaagggcattgcggagggcattggacctccccacccactacagntaactcaagacaacataccatgctacaaagtcaccccattaacacatcctttccaagtcaagacactgccttacaaatgaactccaagactatngaaatgatnaaaannaatcttgttcaaatatacagtatctgctattataggaaacatcagggcgt

SEQ ID NO: 5 - DNA, 414 bp, Homo sapiens
  misc_feature 387: n = A,T,C or G
actttcggaagatgaaatatttataatgagttatggaaacaatgttttagaaatgtttttcttggtgtaatttaatgcagatttttacctcgattttgttaaaaaacttgataatttgatccctccatctatttaatatttaatattttcagattctagagtatttaaaatttaaacacaattataaaattaattataattcctacttatgttagctatgatttagggccaaaactaccctggttttgtcttgcaacttgaaacattgtgtattttaaactatataatttgggaacattattttatagactgtggataaccaaatataagatttgtgatttttaatgcttcatttgtgtaaaatcatttgtatattctatttatagnatgcaatttttctagctcattaaaagt

SEQ ID NO: 6 - DNA, 408 bp, Homo sapiens
  misc_feature 367: n = A,T,C or G
acctgtcccagccacaggcttcttgtccacctcttctcccctgcccaccagctgctcagcgcataagaccttcccgacaggctctgcgtgtgcagctctctgcgtccctcctgggccctccagcgtcagacactaatgggagttcccgagatgctcgggtttgagcagggagcaggcagagctgcagtcagagacattagaaaaccagtctgaattgggtctgtctttgagatgcccaggccagcagaaagcagctcagaagtattgttgctcatggtgtggcaatggactgaactgtaatgaaaatgttatttaatctttgtctctgtattttgatacttgaatgactttcccttttgttttactncatataaaattgttaatctgtctgattttgtctgaattata

SEQ ID NO: 7 - DNA, 489 bp, Homo sapiens
  misc_feature 364: n = A,T,C or G
acaaaaataaacagacatttatttccagacttatcttttacataagttaaatacacatttgtctgaggcactgaaacattcgcatacacaacccaaattcccaggttttgtcagcagatcaatgttaataacaaatcaagttttttttttaaaaaaaacagtgaacagtgttttatacaagcatattgactatttctttcttaaccttaaacattctaaacgtaaaattgtaaagaagattctcctgagttatctttaatgatatttatttcattttctccctcttcccaaaagaaaatttttttcaattatttatataaatactattatctgtaatcagcgtttgatttaaaaatattaaaancccacagtgcttgacacagaatattttctcaataaattgtggctgaacaaattaacgaagcatccacagatccctcaaaacattttaaaaggtcagtcttatggcacattcaggctaatgagaca

SEQ ID NO: 8 - DNA, 195 bp, Homo sapiens
accattggtggccaattgatttgatggtaagggagggatcgttgacctcgtctgttatgtaaaggatgcgtagggatgggagggcgatgaggactaggatgatggcgggcaggatagttcagacggtttctatttcctgagcgtctgagatgttagtattagttagttttgttgtgagtgttaggaaaagggcgt

SEQ ID NO: 9 - DNA, 499 bp, Homo sapiens
acaatttctttatattcttccttggtgatatctttattttggtaaaatggcttgatggccaattttacctcttgtgctgctttttcttgaatttgcaatttctgatgagaagaaaatgtataatttattatttgccagtcatactgctctcacaaaatcccaaacaagaaattgaaaatacttcatatttacaataagagactctccaactattaacgtgacaaatataaaacagtttatttactaaaacatatcaaacatttctaaaaacaattataaaatattaccagtaatttactggacatcaacacatctagagagaatccttcaaataataatggcatttagacagccaataagaaattcccttcaccactcatacaataaaaagctgatattttttctcctttatcatatacagaattatgaaggttgctctcaaccttgaacttgccttgtctgtcttcgagctatctgcgctggcttccactgcaacact

SEQ ID NO: 10 - DNA, 539 bp, Homo sapiens
acttacaacagttttaaagcaattgatactttcagaacaatctcaagcttaattggttaccattataagatgcagaactttttaatgttttctggtccctgaaaattcaatagggccaaatgcattaactggaaatagcatttttttaaagtcttaatcaaagatgataatggataaaacaactatataggctctcatacacaatctttcttaattttcaccttgtaagaaatgattacaatgtccttcaggcttgttatacacccccacagaatcaagaagaaagccaacaaagaattgaacatttcaacaagctaggaaatatttactgtaagcatattgtgaaattctggaagacatactatcaatactttgggaaaacactattaacatgtgttgaagaaggcagtttataaatgaaacattacaaatcttatgtttatgcatacaacttataaaatagaaaaaagctgctatttttccaatagtatagcatcacactaacactatatagttaagattgaaaacttctgtacctc

SEQ ID NO: 11 - DNA, 318 bp, Homo sapiens
gcagaaatgaatggctcaaaacttgggagaagagcaaaacctgaaggggccctccagaacaatgatgggctttatgatcctgactgcgatgagagcgggctctttaaggccaagcagtgcaacggcacctccatgtgctggtgtgtgaacactgctggggtcagaagaacagacaaggacactgaaataacctgctctgagcgagtgagaacctactggatcatcattgaactaaaacacaaagcaagagaaaaaccttatgatagtaaaagtttgcggactgcacttcagaaggagatcacaacgcgttatcaactg

SEQ ID NO: 12 - DNA, 168 bp, Homo sapiens
acctgtgggtttattacctatgggtttatatcctcaaatacgacattctagtcaaagtcttggtaatataaccaatgttttcaaatgtattctgtcatacaaagagcagatttttattgaacttgtgcaataactatattaccatacaatataaatattcatgaatag

SEQ ID NO: 13 - DNA, 410 bp, Homo sapiens
acattaaatgataatgtttgaagatcacacaaagatttcacaaaactataactaatacagaaagatgtgtgaaaacattaggggctttcaaaattttaggtatggaattttgcaaagattattttggcttataagtgttaggcaatcactaacctgaaataagtgacaaaaacatgcagatgattaccatttcaacaaatgaaaagctataaatgtctagctaaaagctaaaatattgtgtagctgaaatactaccatataacaatgggaatttataaaacaggaaaaaaggttattctttaaaagtcttccatgagtaatagactttcagtaattttctataaaaacattcagaaattaagtttctcaaattatgtttatcaccaaaattatgttttcagtagtgactg

SEQ ID NO: 14 - DNA, 374 bp, Homo sapiens
acacaatggtttattaaaggaatgtatggcccacatcaacctagcaaggattctactggtaaaccttcctatggccaaaggaaaaacaagcaggagttgagtggctggggtggggtgcaggcaatggagagagggcagaagggtgtagaagctgaaggggtctagaagcttactcctgagtttcttccttctgtcttcaaatctttacttcttatggccaaagacccagctgtttcataggctggagatgcactcttctagactgctcgagacagccagagacaggggaggagggaagaaggatactgtggaaagggatggcggggcaaacatttagagctagaagccactactgggccaatgctaaagtttct

SEQ ID NO: 15 - DNA, 403 bp, Homo sapiens
accttcaccagaaattgtcccacattaaaggtctcatcctggagtttgaggaaaagaacaggggcagctgaagttatcaagggaatttttgggcctctgcttagtgaaacacaaaggaacaaagcagctataaactaaatagaatgcaactatctgcttttcttatgctgaccactggagtccatggtggcaagtagagagctgctctaggttcttgaggtttggttttcattattaatttttagggtatgggcactgtgcaaagactccatagctgtgcctaggagtctaggaaaagtgacagaggcttggcttttttacctttagttcagccaagtcattttcaagtcctgagaaatgacatcatcttcaggataaaataatgaggacattagacaaacca

SEQ ID NO: 16 - DNA, 494 bp, Homo sapiens
accctcttcaagaatcggatggatgtcgttttgaagggcgacaatcttcctcagtatagaggggtgaacattcggagattgctcaacggtagcatcgtggtcaagaacgatgtcatcctggaggcagactacactttagagtatgaggaactgtttgaaaacctggcagagattgtaaaggccaagattatgaatgaaactagaacaactcttcttgatcctgattcctgcagaaaggccatactgtgctatagtgaagaggacactttcgtggattcatcggtgactccgggctttgacttccaggagcaatgcacccagaaggctgccgaaggatatacccagttctactatgtggatgtcttggatgggaagctggcctgtgtgaacaagtgcaccaaaggaacgaagtcgcaaatgaactgtaacctgggcacctgtcagctgcaacgcagtggcccccgctgcctgtgcccaaatacgaacacacactg

SEQ ID NO: 17 - DNA, 478 bp, Homo sapiens
  misc_feature 15, 293, 348, 354, 361, 372, 388, 437, 438, 440, 465: n = A,T,C or G
acaggtcagagtctncttttcttttctttttgagatggagtcttgctctgttgccagactggagtgcagtggtgcgatctgggctcactgcaatctccacctcccgggttcaagcgattctcctgcctcagcctcccgagtaactgggactacaggtgcgcgccaccaagcccagctcatttttgtatttttagtagagatggggtttcacgatgttggctaggatggtctcgatctctggtcagagtcttttctgtaaatatccttggtaaagaagcaattttagactgtanctgttgcaaatgctttaaggaagaagcaaaaacaactgttcagtcttcctgaaantgaaanaaactanaccagggctgntatatcagaggaaccncaaccagcactccaatcatgatgccgacagtggtcccagctggagagannangagaagttccagatgcagagactgngatgctcttgact

SEQ ID NO: 18 - DNA, 431 bp, Homo sapiens
acgagctgcaggaggttatcggcagtggagctactgctgtggttcaggcagccctatgcaaacccaggcaagaacgtgtagcaataaaacggatcaacttggaaaaatgccagaccagtatggatgaactattaaaagaaattcaagccatgagtcagtgcagccatcccaacgtagtgacctattacacctcttttgtggtcaaagatgaactttggctggtcatgaaattactaagtggaggttcaatgttggatatcataaaatacattgtcaaccgaggagaacacaagaatggagttctggaagaggcaataatagcaacaattcttaaagaggttttggaaggcttagactatctacacagaaacggtcagattcacagggattttgaaagctggtaatattcttctgggtgaggatggttcagt

SEQ ID NO: 19 - DNA, 146 bp, Homo sapiens
acaaacttttattaggatatctatttatttaatactgaactttggcctactttgtgataagactataaacaaattgaggaaatcactatttctcacttctgtatttctcaaaaaataattttgttacagagttcaatatactgtgt

SEQ ID NO: 20 - DNA, 459 bp, Homo sapiens
  misc_feature 358: n = A,T,C or G
agctgatgtggcttattattttgaaaaagatgttaaaggtgaatccttgtttcattctaagaaaatggacctgacagtaaatggggaacaactggatctggatcctggtcaaactttaatttattatgttgatgaaaaagcacctgaattctcaatgcagggtctaaaagctggtgttattgctgttattgtggttgtggtgatagcagttgttgctggaattgttgtgctggttatttccagaaagaagagaatggcaaagtatgagaaggctgagataaaggagatgggtgagatgcatagggaactcaatgcataactatataatttgaagattatagaagaagggaaatagcanatggacacaaattacaaatgtgtgtgcgtgggacgaaggacatctttgaaggtcatgagtttgttagtttaacatcatatatttgtaatagtgaaacctgt

SEQ ID NO: 21 - DNA, 571 bp, Homo sapiens
  misc_feature 17, 29, 31, 40, 51, 91, 106, 142, 179, 180, 437, 460, 465,488: n = A,T,C or G
accatttgcctcccggnctcaagcgattntnctgcctcancctcccaagtngctgggattacaggcacctgccaccatgcccggctaattnttgtaattttagtanagacagggtttcaccatgttgcccaggctggtttcnaactcctgacctcaggtgatccacccgcctcggcctnncaaagtgctgggattacaggcttgagcccccgcgcccagccatcaaaatgcttgtttatttctgcatatgttgaatactttttacaatttaaaaaaatgatctgttttgaaggcaaaattgcaaatcttgaaattaagaaggcaaaaatgtaaaggagtcaaaactataaatcaagtatttgggaagtgaagactggaagctaatttgcattaaattcacaaacttttatactctttctgtatatacattttttttntttaaaaaacaactatggatcanaatanccacatttagaacacttttttgntatcagtcaatattttttagatagttagaacctggtcctaagccctaaaaagtgggcttgattctgcagtaaatcttttacaa

SEQ ID NO: 22 - DNA, 283 bp, Homo sapiens
actagaagcagccctaaaattaaacaaggatctttatgtccatacgatgagaactctagatttattggccatggaaccaggcatggtaaatggagaaactgagagttctactgctggattgaaagtcaaaaccgaagaaatgcagtgccaggtgtgctatgatttgggcgcagcatacttccagcaaggctccacaaattcagctgtctatgaaaatgccagggaaaaattttttagaaccaaagaactaattgcagagataggttcattatctcttcattgt

SEQ ID NO: 23 - DNA, 496 bp, Homo sapiens
accacagcctcatcccttggtcaacaatctacaaccttccacagcagcccaggcgacactgaaaccacactcttacctgacgacaccataacctcaggcctcgtggaggcatctacacccacccacagcagcactggctcgctacacacaacactgacccctgccagctccacaagcgctggtcttcaggaagaatctaccactttccagagctggccaagctcaagtgacacaacaccttcacctcccggcaccacagcagcccctgttgaagtatccacaacctaccacagccgcccgagctcaactccaacaacacacttttctgccagttccacaaccttgggccgtagtgaggaatcaacaacagtccacagcagcccaggtgcaactggaacagcactcttccctacccgctctgcaacctcagttcttgttggagaacctacaacgtcacccatcagttcaggctcaacggaaacaacagcgttacctg

SEQ ID NO: 24 - DNA, 464 bp, Homo sapiens
acgtggcaggaccgaaacctgcttcagcagtattcccctactatgtctgccacacatggttgtagaggttaacctaatataagctccctgttccttactaatagtaacaggtagtttttgtttctcttgagaccaagtttagatgtgactgaacattttcactgagcggggtgaagtcaagcaagggggatttgttcttccactggtatagaaattatgttttgaaattttcacattgtctcatggaatttccctgtgagttttcttctggtgagtgactcagttttgcttcctactagacactctgcatctgtatattcagcctataggtaatacttgtgtggttttattaaaatctgaaaaagttagaaaaagtattttcagctggtgtgggtgtccatcctgaataagttcatttgtaaatatttcctcagggattggaatcaaacagttaagcttttaaa

SEQ ID NO: 25 - DNA, 502 bp, Homo sapiens
  misc_feature 475: n = A,T,C or G
acctgtgggtttattacctatgggtttatatcctcaaatacgacattctagtcaaagtcttggtaatataaccaatgttttcaaatgtattctgtcatacaaagagcagatttttattgaacttgtgcaataactatattaccatacaatataaatattcatgaatagtttcccaagtctggagcgaccacatagggagaaaatgtaaatgtctcaatttttgttcacaaaagtatattttatcaaattgctgtaagctgtggatagcttaaaagaaaaaaagtttcctgaaatctgggaaacaagacatttaaagaatcagcaaaatttcaaataaaaaattatgaaaatattatcctcattagttcatttagtcccatgaaattaattattttctctgcttgatcttggtggacagttttcatgaagctgtcagttagttcattaaagttttggaaattctcagacagtgcantggtatcagaaacttgtattcaagagt

SEQ ID NO: 26 - DNA, 386 bp, Homo sapiens
  misc_feature 370: n = A,T,C or G
acggtcagtctgccctaccatcttgggagctaaaattctaaatgtgtgaacagaagagttaatacttcaatgttcaattctgaaatttagaacaatttatatgatttgactagactgctcaaagcaattacaaacacacaattgagtaggtagttggttattttgcttttctgtgggtgggcagtcaaagaacagagagtaacaaatggagtaagaaaaaaaattttgtttctcattttgggggtattcagggggaatcacagggaagtttaaacctctgaaatccatttgaccgatgcactgaggtccaagatgaaattttcaatttcttgaataaccccctttccttgagtatcaaactgattggtangtcacatctctaaagt

SEQ ID NO: 27 - DNA, 449 bp, Homo sapiens
acctaaatattttatcaatttgaaacacaaattcataaattgtcattattctcagaggcaacaaagcatagaaataaatatttaagttttttctttcttttcttcttcaatctgtgttttaaggctcagagcagacattaagaaatatcaaacaattttttataaaaagtttttcaaatgtttggcccaaagtgaagttgttctgttgatgttatttaaatattcctctcatcttctcagccacaacttcaaagacgtgttcatgccagtcattcacccaaaataaatttcaattcaatgaaaagtaaataacttagggatctataaatgacactgcaatgtatcttgttccatttttaacaggaagtccttcatgcaaatgtgtgagtctcccaggatgcatgaagctccagccttttcgtggtgactcaatagagcaattgtacctc

SEQ ID NO: 28 - DNA, 462 bp, Homo sapiens
  misc_feature 371: n = A,T,C or G
acttcgctcatcaggcataatgtctaaaatctaatatacataattccattaagtggttgaaggaagcaaataatggaattgtcaattggtcatctggctgtaaggtttgcccttgaactaaaaatgttgtttggggcaagggccagaaatgtggagacatggtttttgttacgcattcttgtattatatgtgactaaatttacaaacaagatacatgtgtaattaaagacccttatggaactggaagacgtcttgtagtgctacattgggtgaaaccgttggtccatttttgtctgtttctatgaagataaaataattgggggccatctagaaatagaaaggcagtgggaagacagattctacggcactgntttcatttaattgggctttaggcactccattcgaatgcagaacctcacctctagttgagaccaagaattggcaaatttgcatgagctcctg

SEQ ID NO: 29 - DNA, 305 bp, Homo sapiens
  misc_feature 41, 137, 144, 199, 217, 235, 257, 266: n = A,T,C or G
acaagctttttttttttttttttttttttttttggctctanagggggtgctatagggtaaatacgggccctatttcaaagatttttaggggaattaattctaggacgatgggcatgaaactgtggtttgctccacanatttcanagcattgaccgtagtatacccccggtcgtgtagcggtgaaagtggtttggtttanacgtccgggaattgcatntgtttttaagcctaatgnggggacagctcatgagtgcaanacgtcttgngatgtaattattatacgaatgggggcttcaatcgggagt

SEQ ID NO: 30 - DNA, 370 bp, Homo sapiens
acattccacaagcattgccttcttattttacttcttttagctgtttaactttgtaagatgcaaagaggttggatcaagtttaaatgactgtgctgcccctttcacatcaaagaactactgacaacgaaggccgcgcctgcctttcccatctgtctatctatctggctggcagggaaggaaagaacttgcatgttggtgaaggaagaagtggggtggaagaagtggggtgggacgacagtgaaatctagagtaaaatcaagctggcccaaggtgtcctgcaggctgtaatgcagtttaatcagagtgccatttttttttttgttcaaatgattttaattattggaatgcacaatttttttaatatgcaaat

SEQ ID NO: 31 - DNA, 202 bp, Homo sapiens
acttaaactggctttgtatatatgtataaatgctggtggtggtgaaagtagtcttgttttatgaggatgtctgcattaaagcagtaaaataagctttccattttattcataatctaatgtgtgtgtatatatgtatgtgtgtatgtgtgtgtatatatagatgtatatatatacacacacagagatatatacatatggctgt

SEQ ID NO: 32 - DNA, 527 bp, Homo sapiens
acaattttgaggtttattttttgtatttttattatttgtgcgaagaaccattattgagtttgcaagataagatgtatttgtattttctagtgtctttttatttataacaacacttttttggcaatcagtttgtagctgtgcccttatttttatagatagtttgccatttcttgggtttaatgtttaacaaggctatagaagtttaaaatagtggacaaatgtttgtgaatacacttttaaaaaattgttttaaaagagaaaagcggtcttgctttgttgcccagactggagtgcagtggcataatcatagctcgccgcaagcctcaaatttttgtgctcagatgatccttttcatctcggcctcctgattagctgggactataggcgtgtgccaccatgcccagctaattttgaaatttgcttgtagagatgggatctcactctgttgtccaggctggtctcagaattctggtgagtgatcctcccacagtggacttccaaagtgctgggattacaggtgtgagcca

SEQ ID NO: 33 - DNA, 481 bp, Homo sapiens
  misc_feature 307, 308: n = A,T,C or G
actggagcaaaagcccagtgtatatgaattggtattcctagagaaaaaaagaaatgctcacacctttgttattttaaagtgttttcttgaaaataattagggagaaaattttctggcaacaggttatgtaagacaacaactttttttattatttcaaaacaaaacaggcacatgccaccatgccccagctaatttttatattttttatagagacagggttttgccatgttgcccacgctggtcttgaactcctggactcaagcaatctgccagcctcggcctgctaaagtgctaggattataggcgnnagtctctgtgcccagcctgacaaaatcttttatttatttaaatgttagtaatacgtttattgatgagactaggagcttctctgcagcatcttcataatacattggttttagttcccacactattcccacatcttatctgggaagattagaaatacagatgtaatatggaagct

SEQ ID NO: 34 - DNA, 51 bp, Homo sapiens
cttttgtatgagctgtggctttttcccattgtgaagcattgaatatcacat

SEQ ID NO: 35 - DNA, 134 bp, Homo sapiens
actaaatattgctgagagcatccaccccaggaaggactttaccttccaggagctccaaactggcaccacccccagtgctcacatggctgactttatcctccgtgttccatttggcacagcaagtggcagtgtta

SEQ ID NO: 36 - DNA, 512 bp, Homo sapiens
  misc_feature 461: n = A,T,C or G
tttagagacggagtcttgttcagctgcccaggctggagtgcagtggctcgatcttcgctcactgcaaccaccgtctcctgggttcaagcgattctcctgtctcagcctcccaagtagctgggattacaggccaccaccatcatgcccggctaatttttgtatattggtagagacggagtttcactatgttgggcaggctggtcttgaactcctcgcctcaggtgatccgcccgtcttggcctcccaaagtgctaggattacaggcgtaagccaccatgcctggccagatgatgtatttaaatatcataccaaactctgtgtatttatataaagagagactgttaaaagacttcataatataaaaaaaaacaaaaacaaaaacaaaaaaaaactttacgcttaccattgctgcatattgttgcagtataaaacacacacttatctgggatcatgagaatacngcaagaatgtcctgcgtaaactgtaactttgacagcatttaaaaaataaaa

SEQ ID NO: 37 - DNA, 399 bp, Homo sapiens
actataagaagacatgcacacaaagatgtttgttatgattattgaagtgttaaatggaagaaaaatgttacccaagtcttctccaaaaagaatggtagatatttccttgaaatgcctaacccatttctggatgagactcatcaatatccccttcactccactctctgccaactcagatataatttccattgggcaccttcacagtaatgccaggattggggcagagatcctgaaagagcttcttataagatggcaaatgtgcctggcaagagcatttgtattttgtcaggtggaggcatgtgctgagagttattcaactatctgaaatgttgaatttggaggttgtgaaaatattgaattatgctattagtttaataatatctgaggcagtaaaatagt

SEQ ID NO: 38 - DNA, 242 bp, Homo sapiens
actctgagaacaattaaaattgtccagagatcatttatattaccttccaaattgtttattacccaagatcctttgggagaaaatcttatagaatgggggaacaatatgtggtttaaagttattttaaaatgccagttaatttcctcggcaaaggacaatagaggaacttagcttaattgtctggctttaatttaaactgtgttaatacaacattaaaataaaacactaaatacttttgaggt

SEQ ID NO: 39 - DNA, 526 bp, Homo sapiens
  misc_feature 198, 280, 300, 302, 373, 416, 426, 509, 517: n = A,T,C or G
acaagcttttttttttttttttttttttttttttgggttttctaattttatttgaacacaaaatatttaattttttgcatgtagagaataagaggtaatcattagcctgaaaagagaggatttataatcaacattatgcagaaagaaagcaaaattacaaataccagcctactcacatgaaaatttttcatgtttacnctgatatatatctgagtgcttatcatcaaagtaggaagttaaaaaaaaaaaggcagcttaacaaagttccagtgtttcaaanaaagcacttttaaaaatgtntntacatgaacgaacatttcattatatcataaaataaatgctgcgctgtaagataaaggaagactaacatatntggagtttttggcctttttccgccccctccagctgcaaccatntttaacctgntgaacttaatctcaagggttacaggagtttttttgcttttctttttttctcctgttcagttcacatttcaggctgttcggcanatgcctgngattctgga

SEQ ID NO: 40 - DNA, 407 bp, Homo sapiens
  misc_feature 143, 148, 150, 174, 185, 199, 219, 231, 236, 245, 251, 253,259, 305: n = A,T,C or G
acacctttgactacagctgcagaagtgttcctttagacaaagttgtgacccattttactctggataagggcagaaacggttcacattccattatttgtaaagttacctgctgttagctttcattatttttgctacactcattntattngnatttaaatgttttaggcaacctangaacaaatgtnaaagtaaagatgcnggaaaaatgaattgcttggnattcattacttnatgtntatcaagcncagcantnaaacanaaacccatgtatttaactttttttaggatttttgcttttgtgattnttttttttttgatacttgcctaacatgcatgtgctgtaaaaatagttaacagggaaataacttgagatgatggctagctttgtttaatgtcttatgaaattt

SEQ ID NO: 41 - DNA, 265 bp, Homo sapiens
accattgattttggaaacttcccagtcgttttgtaagcttccactgccgagggaaaatgtaaaatggggaccccgaaataagtgctgatcatcatcagtagcctcgaaaatgagacttccaggtgcactgaggggatggcagaagaacaagcccgtgtagtccttggctagcctgggagggttgtcattcacatccataaggatcaggtggaactctgacacagagcttaaggaagacccccctacttctgtggccaccacttgt

SEQ ID NO: 42 - DNA, 455 bp, Homo sapiens
acagatttctgcagctcctcatatggtcagtgaactctgggatcggcgatggctgctcctctttgagcaccggcacatatcagtctgtcctcttgagtaggccattatcctgttaggtcccagcaggtgctccccggatgagagttgagctgaggagtcccctgagcatgagtcatccctcatgcactccgtgccacatctctgttcgtggagcactgactcttccacatgcttcctcttgggagggttagagctctttggggtgctggcactgaagtcctgtcctgtgatagatgacactgggtggtgggtgggtcgagccacttcggggacaggggcaggcctctgtctgcttctccaactctggatttccaggtttcttttgtctggggggagtttgtcaattttctgagcttttgagattagagacttcccacaagttccttgcagagaca

SEQ ID NO: 43 - DNA, 362 bp, Homo sapiens
acctaacaagggaagagaatctttcagatgaagggtcaacagaaaataaagaccctaaacacttctaaaagtagaacgcagttgaattttgcataactaatctgggaatggagtaaaagaaacaaggttacagaatgtagtgctttagggactttagaaattaggggcagtatgtatgagaatgtgtgctggacactggaggtgtcccaggagctttgaagcactaggtttggttcaatcccgacaaactcccagccatgtgcaagcactgcctcacggggtgcccagagccatgaattcttttcatctgagttggcatccggtcagctgagcatggaacatggggccaccccaaacgccgt

SEQ ID NO: 44 - DNA, 269 bp, Homo sapiens
  misc_feature 18, 19: n = A,T,C or G
actacaaggtaaaggaanncttaataaaatcaatggagcctttcataccagaaaggattttatttgaaatacccgtattacctttttagattttcttttctgaaatcatgcagagaatatgttctgtgtaaaatctaacatcgttcattggaaatatagaattttttaaaaataatggcacctaaaaacttaatactgtatatcaattaaagtcaatatagtggcatgtaaaatgaagtggaaaaaactaaatatatatatatatatat

SEQ ID NO: 45 - DNA, 404 bp, Homo sapiens
  misc_feature 299: n = A,T,C or G
acagatatctttccagtggacaattcagatactagttctagtgtggatggaaggagaaaacataagcaaccagctctcactgcagattttgtgaattattattttgagagaaatatgcgcatgattcaaattcaggaaaatatggctgaacaaaagaatataaaagataaattagagaatgaacaagaaaagcttcatgtagaatataataagctatgtgaatctttagaagaactacaaaacctgaatggaaaacttcgaagtgaaggacaaggaatatgggctttactaggcagaancacagggcagaagttgaatataccggcaattttgcgagcacccaaggagagaaaaccaagtaaaaaagaaggaggcacacaaaagacatctactcttcctgcagt

SEQ ID NO: 46 - DNA, 292 bp, Homo sapiens
  misc_feature 10, 11: n = A,T,C or G
acgatgtctnntgatgagtttgctaatacaatgccagtcaggccacctacggtgaaaagaaagatgaatcctagggctcagagcactgcagcagatcatttcatattgcttccgtggagtgtggcgagtcagctaaatactttgacgccggtggggatagcgatgattatggtagcggaggtgaaatatgctcgtgtgtctacgtctattcctactgtaaatatatggtgtgctcacacgataaaccctaggaagccaatttgatatcatagctcagaccatacctatgtat

SEQ ID NO: 47 - DNA, 464 bp, Homo sapiens
actaagtctagtgatcctttgggcaagttactgaggtgactttgagaatcaggccttctaatctgaagtgtttttatttcacaggctgaagtttctctttggctcatcagctacccaggccttggacctagttgatcgacagtccatcaccttaatctcatcacccagtggaaggcgtgtttaccaggtagaagtctagagatgggggtgatccctacagaaaccccttaggacaaaatgttcttcatctctgtagaagctgttgactagctttaaatatttcctggactgttaaaaggcttttgccccaacttggtaaaattaacgaattgataattttttaaaatttttatttacttttaactgacagaaactgtctatattcatggtatataacatgatgttttgatatatggataccttgtagaataactaaatcaagctaattaacatatctaatacct

SEQ ID NO: 48 - DNA, 308 bp, Homo sapiens
  misc_feature 16: n = A,T,C or G
actaggtttgcactanctaaaaaaataatgtttacagttgtctagatgtaacaattttaaaaacatacaaattcagtatgtagtatgaaaatacattaaaaaaacacataaggaactatgccccataaaaaatataaatgcaacttctattaattatatgaatatcaaaaattaaatattctgatttaaaagtagcttctataaaagtcggagtagtaggcattatttgctttcctaaatgtataaataagaagtatttctagctcaactaaacagaaatatcagtatttcttagcaaaaaatgtagt

SEQ ID NO: 49 - DNA, 237 bp, Homo sapiens
acaaagaccctcagagtaagaaaaaaggctggtggtatgcccattttgatggaccatggattgcccggcaaatggaactccatcctgacaagccacccatcctacttgtggctggtaaggacgacatggagatgtgtgagctgaatcttgaggagactggcctgactcggaagcgtggtgctgagatcttgccaagacagtttgaagaaatctgggaacgctgtggaggcatccagt

SEQ ID NO: 50 - DNA, 176 bp, Homo sapiens
acttggaaaaggaataatctcttggctttttaatttcactcttgatttcttcaacattatagctgtgaaatatccttcttcatgacctgtaataatctcataattacttgatctcttctttaggtagctataatatgggggaataacttcctgtagaaatatcacatctgggctgt

SEQ ID NO: 51 - DNA, 480 bp, Homo sapiens
  misc_feature 90, 94, 248, 250, 419, 432, 460: n = A,T,C or G
ttttttttttttttttttttgaaaaagtcatggaggccatggggttggcttgaaaccagctttggggggttcgattccttccttttttgnctanattttatgtatacgggttcttcgaatgtgtggtagggtggggggcatccatatagtcactccaggtttatggagggttcttctactattaggacttttcgcttcgaagcgaaggcttctcaaatcatgaaaattattaatattactgctgttananaaatgaatgagcctacagatgataggatgtttcatgtggtgtatgcatcggggtagtccgagtaacgtcggggcattccggataggccgagaaagtgttgtgggaagaaagttagatttacgccgatgaatatgatagtgaaatggattttggcgtaggtttggtctanggtgtagcctganaataggggaaatcagtgaatgaagcctnctatgatggcaaatacagct

SEQ ID NO: 52 - DNA, 512 bp, Homo sapiens
  misc_feature 304: n = A,T,C or G
actaatgactgtaagatgagctataaaatgcttttttttttggatacataatttatagactgggtgtcagaagacttttccaatctactttttgaataaaggaagatggaatataaaatgatttgtttcccttaaaaagagggagggcaggttatagactgaggaactgaacaattttaaaaagttcaaacaattatttgaaccaactatttaccatatctgcagagagtctagaaatcacaattaatttgacttctcgaattcaaaaacggttctgttttatgatagtaacgcaaaaacttcntacctataaattactgtatagaatgtttgtattaagctatttttctctgaatatgtctttagaagaacaaataaaatatttaaacatgtaattaatacatggaatataacaatttcataaaatactgaaatacattaatctttttgtaatcttattttccactagatgtatttaaattcttgaaaatgccttttgactatgacacaaa

SEQ ID NO: 53 - DNA, 413 bp, Homo sapiens
  misc_feature 376: n = A,T,C or G
acaaaaaacccttgagattaatttttttctaaaagaagaccttaccaaaaataacttttaaaaaatctgtcaaaccatatgatagacctgaatattttccttaagactgtaaactttttttctgaaaacaattataaaaaagtagtttataagtaggattatttttctttaaaattttccaagatcatattacttgacaaataagtgtcattttgaaatttaaaacatgattttttcctaataaaattattagttattctgacatcttattaacagatcttagttgaattccacttaatttccctggggacagctgagacactgcatttttccaaatagtcttaaaaagttaaagataggcattatttaaaggagngtcttacagtgaaaaaaagaaatcattcaaagaaaac

SEQ ID NO: 54 - DNA, 396 bp, Homo sapiens
tagaggggaagataccaaggtagatatgggggaggtcagtagatgcagacaaccagtctacaatgtgtagatatagacaggaaagaaaaaagaattcagagaccataaggctaaggaaacaagttgggtgtgaaaaaggaaaaaagaattaaggattgcagaaggaaaaagaaagaaaaaagatgggaacaaaaatatgatagcgtataaagagaagaagaaaagaatcacttctaattctctgccccactcttacctctaaattgtcccatcactactgtctactagaaccagagtctattattgattggcccacatcttaagtttgtgcccgcccaggaaaatcaagcacctttccttactttagtcttcaatcttagctgaactgtgtcacgt

SEQ ID NO: 55 - DNA, 366 bp, Homo sapiens
  misc_feature 253, 302: n = A,T,C or G
actgtgcaggtgggttagaggctgcgtggcaggagaggttcagattttcccctgatctgtaagatgtgtttagaggggaaatggtgggggcatccgggccatagaggacattcaggatgactgaatcactgcgcctggcactcactgggttctgggtttcacatttgtagcttgctgtgtcatttcttgtgacattgaatagagtgagggtcctgttgccattgggacagctgcagcctgggactgaccgggnaggctctgattgtttacccaccacaggtaggttgcgtcctgagtctcangttcacaggtgaaggccacagcatccttgtcctccacgggtttggagttgttgctggagatgga

SEQ ID NO: 56 - DNA, 474 bp, Homo sapiens
  misc_feature 276: n = A,T,C or G
ggcgggtggatcatgagatcaggagatcgagactatcctggctaacacggtgaaatcccatctctaataaaaatacaaaaaattagccaggcgtggtggcatgcgcctgaggtgccagctactcgggtggatcatgagatcaggagatcgagactatcctggctaacacggtgaaatcccatctctaataaaaatacaaaaaaaaaaaaaaaagaatgaagatgaccagtttacataatttatctaataacttccactttttgaaatatatctaanaataaggaattaaaccaaatacacaggtgccaacattggtttacagttatactaaagctcacatacataggtcataatagttctacaagtcctgactgtaggcccttagtctattttggattaagttctatagcagaattgttttggtttaccaaaaataaagtcagtcatggacagttgcaacaaaataataaactg

SEQ ID NO: 57 - DNA, 533 bp, Homo sapiens
  misc_feature 12: n = A,T,C or G
actgtaaatcanaatcacctgacgggcttgttaaaccagattggtaggccttactctcagagcttctgattcagcaggttttgcgtggggcctgcaaatatgcattatcaagttctcaggtaatgctatgctattagtctatggattacactttgagaaccactggactaggcatatgtgtaagagtgactgtgcgtgtgagtgtgtgtccccaggtgaattctaatcacaaaactactgtatagaaaatatcaataaggttctaagttttaggatactgagattttaatataataagagttgttaaacatcaagatgatttatagaaaggagacctatggacaaatatcaacttattggtcaataaaacttgttccttaaagtcttttacagtatttttttgaaaattaactttttttttaactgcatatatgggtccttcacttcatttttcagtaaagacaacttatttggatatcagtgtctcatcacttgataaggaccagtggaggatttggatagtagccagctgt

SEQ ID NO: 58 - DNA, 377 bp, Homo sapiens
  misc_feature 260, 367: n = A,T,C or G
acataaaatttacaaaaaaaagagacaggaaaattaaaataatcaaatctatataaatacatgaatcatgctgacaacacaggactgatttttcgtttgattattttaacacagacagatgtaaatcccaaaagacgttgggaaatggcacagccgatgaaaacctcacgatgacagtagttgggacactggaaatggctagcacgtccagaggcgcaggatccagcgcagccatgcccattcggctcaccaaaaaaagncttggaagcactgctgcaaagaacagcgcggattactcacatcacctctaggttcactaaagtcaggcactttggggggagttgagagtcagacttccgtgtgctgntgggaatcca

SEQ ID NO: 59 - DNA, 364 bp, Homo sapiens
acgctacaaacaaaagatatattagagacttttgaaaaatgctgaaatactttgcttcagaattggaatgtttatattatgtagaaatcttcaaaggtagcattattaaatagcaaagaataattagaacccacatatcttttttgtgtggatggggaaaatgttttaaaatccagttatttaatatgagtttgagagagaaaattgttttttaaaaatatatgtgcattgaaatgatggcaatgcttatagtatgatcaagtatgaaaggaactttaaattcttatatttacttttctctcagtaaattgttaaattttcactcagcaaaagattggcatttgttaagtgttctatatttagt

SEQ ID NO: 60 - DNA, 492 bp, Homo sapiens
  misc_feature 455: n = A,T,C or G
acttgcatttgacttacgatgtatctgtgaaaatgggatgatattgacaaatggagactcctacctcaatagttaatggaataataagaggctactgttgtgtctaatgttcttcaaaaaagtaatatcctcacttggagagtgtcaaatacatactttgaggattgactttatataaggtgccctgtagaaatctgttacacatatttttgacccatattatttacaatgtcttgataattctacctttttagagcaagaatagtatctgctaatgtaagggacatctgtatttaactcctttgtagacatgaatttctatcaaaatgttctttgcactgtaacagagattccttttttcaataatcttaattcaaaagcattattagacttgaaagggtttgataatctcccagtccttagtaaagattgagagaggctggagcagttttcanttttaaatgagtctgcagttaatatcaaatgtgagtt

SEQ ID NO: 61 - DNA, 378 bp, Homo sapiens
acaaagataacatttatcttataacaaaaatttgatagttttaaaggttagtattgtgtagggtattttccaaaagactaaagagataactcaggtaaaaagttagaaatgtataaaacaccatcagacaggtttttaaaaaacaacatattacaaaattagacaatcatccttaaaaaaaaaaacttattgtatcaatttcttttgttcaaaatgactgacttaagtatttttaaatatttcagaaacacttcctcaaaaattttcaagatggtagctttcagatgttccctcagtcccaatgttgctcagataaataaatctcgtgagaacttaccacccaccacaagctttctggggcatgcaacagtgtcttta

SEQ ID NO: 62 - DNA, 209 bp, Homo sapiens
  misc_feature 115, 118, 136, 163, 164: n = A,T,C or G
acaagaacctcactcactggacattgaaattctactgtccaatcccaactcactgctgttgatttgaaacctgattctggcagctcatttatcttggtttcctcatttgtaaggncgntcagttggactgatcatntctgagggccttgaagccctaacaagnntatcatgatcccagatgtaaaatatatatatgtgtatatatataa

SEQ ID NO: 63 - DNA, 448 bp, Homo sapiens
acttaagaataagaataacatggtccattcacctttatgttatagatatgtctttgtgtaaatcatttgttttgagttttcaaagaatagcccattgttcattcttgtgctgtacctgcccgggcggccgcccgggcaggtacggctatagcctggactttcctgttgtctacaccaatgcccaactgcctgccttagggtagtgctaagaggatctcctgtccatcagccaggacagtcagctctctcctttcagggccaatccccagcccttttgttgagccaggcctctctcacctctcctactcacttaaagcccgcctgacagaaaccacggccacatttggttctaagaaaccctctgtcattcgctcccacattctgatgagcaaccgcttccctatttatttatttatttgtttgtttgtttttattcattggtctaatt

SEQ ID NO: 64 - DNA, 298 bp, Homo sapiens
acattcaccattaagatttgtagtctcatggttttctgtgggattagaagtctgttcagaaggggaaatgcttgcagcattgtccatatctgctagagataatgattctgggtgagaatttagagaattttcctcagaagactcttgatcaaccaaatcaacctcctgagaacttgatgaaatctgttcaccactctgattctgagaatcattttcagaggatggttgttcttcattttccatttcaggatctgtatgagaaagaaacaaacctcatgctacttctctaaaaaaatgt

SEQ ID NO: 65 - DNA, 235 bp, Homo sapiens
actataagaacacattaattcaatggaaatacactttgctaatattttaatggtatagatctgctaatgaattctcttaaaaacatactgtattctgttgctgtgtgtttcattttaaattgagcattaagggaatgcagcatttaaatcagaactctgccaatgcttttatctagaggcgtgttgccatttttgtcttatatgaaatttctgtcccaagaaaggcaggattaca

SEQ ID NO: 66 - DNA, 349 bp, Homo sapiens
acttcaactttaatttctctgtattttcttcctggaaaaatttggtgttaattttcttgctgatgatttgtgttcgaatgtaatccttcacagctaggcagagcctcatttgctccaaaataaattccactcgctctttcttttccattgacccgtaggtttccacctgtaactcctgtaaaatggaggctgcctctttcacatcaccattttgttcttttatagttgctaatgttttagtcagtcgcgcacgctcaatttcaacataaatcttgccttcggtaaccattcgtagagtatcaattaatcgaagtttgataggaaggtctgtgatttcctcaacataagt

SEQ ID NO: 67 - DNA, 238 bp, Homo sapiens
acgatttttcaatgttaaagttcactttcaagtatgatcaataacaagacatcaaatgtaaaaattatgctgtattatcattttctccattgcttcttaaaccactgaaagtaatttcacaattcaccacatttaggcatcttctttttcactttcttcattttttacttctttaggcaacaatggatcaatcttcagtaataaaccttcacttgttgaactacgaaggaaagcacgt

SEQ ID NO: 68 - DNA, 286 bp, Homo sapiens
acagacattttatttctattttgaaatgagttatctattttcataaaagtaaaacactattaaagtgctgttttatgtgaaataacttgaatgttgttcctataaaaaatagatcataactcatgatatgtttgtaatcatggtaatttagatttttatgaggaatgagtatctggaaatattgtagcaatacttggtttaaaattttggacctgagacactgtggctgtctaatgtaatcctttaaaaattctctgcattgtcagtaaatgtagtatattattgt

SEQ ID NO: 69 - DNA, 496 bp, Homo sapiens
  misc_feature 413: n = A,T,C or G
acacaatttaaactgaaagttcattgactattatattgccatgaacctcttctgcctgtgttaaagcacagcagggaggcctggtgggtgtgacggccccctacgtcctcctctgcagacggaatccgacggtggatccatacaccggccccatgatcaagatcccgctcggcccacgtaggcctgagtgcttaaccagcacgtgtccacaccggtcaaactgatcttcacaggctgttggtaattcaacactgtcaatgcatctttaagaatttctttatagatgaaagagaatgttctttgttaataaagacttgagccaaccccattgctacttaggaatattgttttggagatttccatcggaagtcactgcgtatacccattctttttttaaggctacttcccataangctcatgttttgaagccactctaacagaagcccaacctctggcgtctaacccttggttcacttctgaattttcagatgatggg

SEQ ID NO: 70 - DNA, 343 bp, Homo sapiens
actttttattgggtaaaaatggaattgaacagcaacctcaacataagattttttttctagtagcctcccactgattaaagaagcaagtttgaggtttcatccttcaaaagggggttccgagagagcaccgtagggcttttctcaaatagaaaagccagattttgaaaaaattttaaagataaaataggacatattttgcagatatatatatatatacacaaacacatctccaggtatagagaaccatccagatgttcacttttgaaaatatctaatgatgcaaagttttattcttgaacttggacactgatgccatcaaacaaattaacaaatatatttaagt

SEQ ID NO: 71 - DNA, 393 bp, Homo sapiens
  misc_feature 376, 379, 381: n = A,T,C or G
acttcaacttgtttctgtagaaattgccagaaatgttgatgccttcacagcgtacttaaaaagttttttaaaaaataattaaatgcactactcatctcaatgaaatttttcgttttcctattttctagaactttctaaaaaaggaaacaaagcaaaaacaacaacaaaaaaaacctgtttgacttaaggacacttgctgatcttgacacttgataatactttaagaaatggaaaggttttcctaaatctaatacctgcttaatataatccactttggaagattcatctgaaagaaacatagggtttgatttttaatactaatataaaataatctgccttccaatcaaaacaaaaatgttttcaactgtatacgctnctngnttgtgttttgtt

SEQ ID NO: 72 - DNA, 271 bp, Homo sapiens
  misc_feature 147: n = A,T,C or G
acaatgcaagttcttttgccaagttcacgcttattgtgacagatgtgaatgaagcacctcaattttcccaacacgtattccaggcgaaagtcagtgaggatgtagctataggcactaaagtgggcaatgtgactgccaaggatccanaaggtctggacataagctattcactgaggggagacacaagaggttggcttaaaattgaccacgtgactggtgagatctttagtgtggctccattggacagagaagccggaagtccatatcgggt

SEQ ID NO: 73 - DNA, 460 bp, Homo sapiens
  misc_feature 359, 446: n = A,T,C or G
acttcagttggtgcacaaaatactgtcatttgctcaaagctggctgccaaatgtttggtgatgaaggcagaaatgaatggctcaaaacttgggagaagagcaaaacctgaaggggccctccagaacaatgatgggctttatgatcctgactgcgatgagagcgggctctttaaggccaagcagtgcaacggcacctccacgtgctggtgtgtgaacactgctggggtcagaagaacagacaagggacactgaaataacctgctctgagcgagtgagaacctactggatcatcattgaactaaaacacaaagcaaagagaaaaaccttatgatagtaaaagtttgcggactgcacttcangaaggagatcacaacgcgttaccaactggatccaaaatttatcacgagtattttgtatgagaataatgttatcactattgatctggnttcaaaattcttct

SEQ ID NO: 74 - DNA, 151 bp, Homo sapiens
acccggaagagtcacatgaagatgatctgttttaaaatgtgaggcgattattttaagtaattatcttaccaagcccaagactggttttaaagttacctgaagctcttaacttcctcccctctgaatttagtttggggaaggtgtttttagt

SEQ ID NO: 75 - DNA, 415 bp, Homo sapiens
  misc_feature 381, 382, 398: n = A,T,C or G
ccctgtgggtttattacctatgggtttatatcctcaaatacgacattctagtcaaagtcttggtaatataaccaatgttttcaaatgtattctgtcatacaaagagcagatttttattgaacttgtgcaataactatattaccatacaatataaatattcatgaatagtttcccaagtctggagcgaccacatagggagaaaatgtaaatgtctcaatttttgttcacaaaagtatattttatcaaattgctgtaagctgtggatagcttaaaagaaaaaaagtttcctgaaatctgggaaacaagacatttaaagaatcagcaaaatttcaaataaaaaattatggaaaatattatcctcattagttcattttagtcccnntgaaaattaattattntctctgcttgatcttgg

SEQ ID NO: 76 - DNA, 343 bp, Homo sapiens
acagttggtgaaggaagaggtaacaaaaaatgctaaatattttatccatgaaaatgacttccagaaaaggaagaatatgaaccccagaccgaaggggaaaagatagttaatagtattatctaacctggttggtatttgtaatgaatggtgattttaattagtcattagccataatgatgtttatttacagtataactcctgaatgctacttaaataaaccaggattcaaactgcaagccagccaggccgttcattatttaaaacgttttaatcggggcttccgggtagaaggtggagcggcagggtgtaattgggttgatgggtgggacctgtcttgaccatc

SEQ ID NO: 77 - DNA, 446 bp, Homo sapiens
  misc_feature 381, 405: n = A,T,C or G
gctacagcttggactattttttctaaatttttagcattagtccatttctgctgctaacaattgaatccagaaatctactttctccatcttccactgttagtgccagtgagcaatactgttgtgcaacaaaaatgtcactttatctcagtgtgaatgagtagtctaaattccctttctaccattgatttaaatatatatattggtaagagagactgcccatgtgtttagaatagaattttttaaatgaaatgatcaacgggtggaatttgaaatatattcttctacaaaagagatttctttcccttttatattttgatgattgttttcttaagattaagatatgttcttgctcttttataagattatttaaattatgttttncctctgattttttttcaccattgnatttactaagttattggatttacatgaaatctggcacttta

SEQ ID NO: 78 - DNA, 306 bp, Homo sapiens
  misc_feature 70, 84, 221, 237, 241, 270, 272, 279, 284, 288, 301: n = A,T,C or G
caagcttttttttttttttttttttttttttgctcacaaaagtatattttatcaaattgctgtaagctgnggatagcttaaaanaaaaaaagtttcctgaaatctgggaaacaagacatttaaagaatcagcaaaatttcaaataaaaaattatgaaaatattatcctcattagttcatttagtcccatgaaattaattattttctctgcttgatcttggnggacagtttcatgaanctgncagttagttcattaaagttttggaaattntnaaacagngcagnggtntcaaaaacttgtnttcaa

SEQ ID NO: 79 - DNA, 553 bp, Homo sapiens
accagccaacaggaagaccacggggaagaccagaaggaaggagaaatcctatatactcactaatagataagaagaaacaatttagaagcagaggatctggcttcccatttttagaatcagagaatgaaaaaaacgcaccttggagaaaaattttaacgtttgagcaagctgttgcaagaggattttttaactatattgaaaaactgaagtatgaacaccacctgaaagaatcattgaagcaaatgaatgttggtgaagatttagaaaatgaagattttgacagtcgtagatacaaatttttggatgatgatggatccatttctcctattgaggagtcaacagcagaggatgaggatgcaacacatcttgaagataacgaatgtgatatcaaattggcaggggatagtttcatagtaagttctgaattccctgtaagactgagtgtatacttagaagaagaggatattactgaagaagctgctttgtctaaaaagagagctacaaaagccaaaaatactggacagagaggcctgaaaatgtgacaggatcatga

SEQ ID NO: 80 - DNA, 221 bp, Homo sapiens
  misc_feature 16: n = A,T,C or G
actgcttgttctctgnggaggagatgattaaaataaaaatcccagaaggacaggaggattctcaacactttgaatttttttaacttcatttttctacactgctattatcattatctcagaatgcttatttccaattaaaacgcctacagctgcctcctagaatatagactgtctgtattattattcacctataattagtcattatgatgctttaaagctgt

SEQ ID NO: 81 - DNA, 466 bp, Homo sapiens
actttgaatatggagtagtttacagctatttttttttcttactggtaatcttaactaatatgattcccttgttagagagcctctcactcccccacccccaaaaatgtctactattcatgacagtaaccaattattctggacaaattgcttctttttaatttgagctatctgccatggactttctaaaatggaaacacagcctgagtgtatcttagggagagtttgattgaaaaaatccaaatcactatccatatagatcatggatataaagagatacctgatttttattaaaaagatactttttcaaatttaagagttaatcttggaaatttggaacaagtaaaggggcaagtaaaccttttgatgaaatataaaaggaactcattgcatgaagttgactatcaaattctgtgatgtgtggcttcttaaaaatattctcagtgtcttttgtgtgcgtgcagcatgt

SEQ ID NO: 82 - DNA, 468 bp, Homo sapiens
  misc_feature 357, 358: n = A,T,C or G
acttcagttggtgcacaaaatactgtcatttgctcaaagctggctgccaaatgtttggtgatgaaggcagaaatgaatggctcaaaacttgggagaagagcaaaacctgaaggggccctccagaacaatgatgggctttatgatcctgactgcgatgagagcgggctctttaaggccaagcagtgcaacggcacctccatgtgctggtgtgtgaacactgctggggtcagaagaacagacaaggacactgaaataacctgctctgagcgagtgagaacctactggatcatcattgaactaaaacacaaagcaagagaaaaaccttatgatagtaaaagtttgcggactgcacttcannaaggagatcacagcgcgttatcaactggatccaaaatttatcacgagtattttgtatgagaataatgttatcactattgatctggttcaaaattcttctcaaaaaactca

SEQ ID NO: 83 - DNA, 77 bp, Homo sapiens
  misc_feature 12, 25: n = A,T,C or G
actacactgacntgatttgcagtcntgtttttcttcctaccccttaaggctacaaaattctgttgcaaatgcattgc

SEQ ID NO: 84 - DNA, 202 bp, Homo sapiens
actttcttaatgggctgaataaattaattacaattaagtttgctttacatcctgttgaggacctctttgcagccccaggacctaacaatatctggcaggctccaagaatgctcatcaggtgaaatgatggcagaacatttaaagtaaggagccagttacttcagcttaagtcattcagagccaaacatctgaagaacgacca

SEQ ID NO: 85 - DNA, 349 bp, Homo sapiens
acgtggacagccttaggataagctgacattatagatgcagctaggtaggcaacaaaccatagtgccaaatggaaaaagtatatttgcaaataaattttaaaaactaagttaattttttataattaaatacagaaaatatactgatttgctaaaataaataagatgtgatgtattaacacttcactataaagaatgcataccagaacatttataaacagtgagtgagttttattaagaatagtttactacaataaacgctggctaaatagaagtgcattttgtgaagcactatgggtggtatatgttttgccacatactcttgttaccttgaggtagataacacatgtgt

SEQ ID NO: 86 - DNA, 397 bp, Homo sapiens
  misc_feature 273, 379: n = A,T,C or G
actctttatgaaagtctgaaattataaatagaaaagaaccatcaagatactttttaaaaacctaacattgtatattctgaaccacatgctaattaaaattcgttgttcattacacagcaccaatacccatgatacatcttacaagaacaaaactaacatatttggaaaaaagagaaaaaaaaattctgcttcatttacgaatgttgccaaaggaggcaagttttcaactgaaaacaaaacataaaggtctatgtggatgcagccaaatgtttntccatttaggaaaatcatcataaaaggtggcagcactttttttgcttgttaactattatttacttataactggctgcaccaacatttcatctcaattttttggagngtttcttctgatcaatcc

SEQ ID NO: 87 - DNA, 520 bp, Homo sapiens
acatccaaactactgtgtaaacacagaacacacctccaaattatgcttgtgaactaaatgtttcactaaagttcagaaaagtttacaaatttgcttatttatgacatacatttgtagatttctctaatcctttaaatcaaaagaaaaatgaacaccaataaaaaaaaaatcagaagggagaggaaaaaaaattaaatctaatggaaaatattctcttccattaatgtcagagtcaccaaaaacagacaataaaatttacacataaaattgaaaatatcatgatagtgtttacaaatgcacacaactttgagcaaagctttacaaatccttcataccatacaaagcaaatgagaaaataatgtcaattcatttctaccccaaacctagttcttaggagaaaattcgcaggaagagaggtatgagtagtttcacagaatacattttcaagaattttttaaaaactgaaactccaatgcccagaacaagataaacagtatccttagcagttagcactgttaat

SEQ ID NO: 88 - DNA, 257 bp, Homo sapiens
  misc_feature 196, 238: n = A,T,C or G
acctgtgggtttattacctatgggtttatatcctcaaatacgacattctagtcaaagtcttggtaatataaccaatgttttcaaatgtattctgtcatacaaagagcagatttttattgaacttgtgcaataactatattaccatacaatataaatattcatgaatagttttcccaagtctggagcgaccacatanggagaaaatgtaaatgcctcaattttttgttcacaaaagtanattttatcaaattgctgta

SEQ ID NO: 89 - DNA, 419 bp, Homo sapiens
acctgctaaactgttgttttgaccaagtccatgttttcaaacctgctactagcaaggcaggaaactccgaagtctatgtggtttgcctccactataaggggagagaggccatccatcctctgttatctaagatgaccttgaattttgggactgaaatgaaaaggaaagccctttttccccatcatgtgattcctgattcttttcttaagagacatgaagaatgttgtgtgttctttcataaatatcagctagagactatttctgaaaacattcgtctatttgagtgcatgggaaaggcggaacaagaaaagctgaataatttaagggattgtgctatacaatattttatgcaaaaatttcaactgaaacatctttccagaagtaattggctagtaaaaaaatctagtattggttgtagt

SEQ ID NO: 90 - DNA, 310 bp, Homo sapiens
agagccccgaattaataccaatagaagggcaatgcttttagattaaaatgaaggtgacttaaacagcttaaagtttagtttaaaagttgtaggtgattaaaataatttgaaggcgatcttttaaaaagagattaaaccgaaggtgattaaaagaccttgaaatccatgacgcagggagaattgcgtcatttaaagcctagttaacgcatttactaaacgcagacgaaaatggaaagattaattgggagtggtaggatgaaacaatttggagaagatagaagtttgaagtggaaaactggaagacagaagt

SEQ ID NO: 91 - DNA, 409 bp, Homo sapiens
acctgtgggtttattacctatgggtttatatcctcaaatacgacattctagtcaaagtcttggtaatataaccaatgttttcaaatgtattctgtcatacaaagagcagatttttattgaacttgtgcaataactatattaccatacaatataaatattcatgaatagtttcccaagtctggagcgaccacatagggagaaaatgtaaatgcctcaatttttgttcacaaaagtatattttatcaaattgctgtaagctgtggatagcttaaaagaaaaaaagtttcctgaaatctgggaaacaagacatttaaagaatcagcaaaatttcaaataaaaaattatgaaaaatattatcctcattagttcatttagtcccatgaaattaattattttctctgcttgatct

SEQ ID NO: 92 - DNA, 466 bp, Homo sapiens
acagtgaaaaacaaactaatataaagcattccagttgataaaaacctcctcaggcttatggtttgttttccaaggaaattatgtttcaatgtaaagtttgaaatactccagacatacattccatgtaggttttgggtgccaatgttaaaatttcaaattttgcatgcaaggcttagcaaagaaacactggcagaattccagcatttgcaaaattctaagttttggtgaatattgtaaatattacaattggtattagaaagccatgatgaatccagaattaagagaaaacccatttcataaatattttgtttgattaaaaaataccaggcttaccatgttctaaataactcaagaaaatatctttaaaaaaaaaaggactgcaatttaacagtaatctgtatatctttagctgccattaaaaaaagaaaaaagaacaaaccaaaaacaatgaaaatgtttacaactg

SEQ ID NO: 93 - DNA, 487 bp, Homo sapiens
  misc_feature 189, 444, 473: n = A,T,C or G
acattttatggctcccagagcatatattcagttggtgcatgttgtggaagggggaattggaaattaaatgaaaacctatgactttggtcatgtcaatctgtaagacacatcagtaaaagggtattatgctctgttggttttgtttttttgttttgcttttttttttttttttcttttttgttttttggngatgtggcttaaatgcaatagtttcttttttgggacatatttctgccaattaaagactagaagggcacaactttttttttaattaccatagagaagatacattaaaaaaatcttctgatgttttgtagccataactaaattatggtaaaaatgtgcactattgtgaaaaggagcaacgtagttttgggttttttgttgtttgtttgttttgctttgttttttaagagattaaaatgtttctggataaaggattancttctcgaagtgtccatcattctgtgtanaagcttaaatatgt

SEQ ID NO: 94 - DNA, 451 bp, Homo sapiens
  misc_feature 404: n = A,T,C or G
acgtgaaccacaaagtgtataccaggcatatgacatggatccccctggggaaccaggctgatctctttccagagggcactatccgaccagtgcatgatgatatcctcatcgctcagctgcggcctggccaagaaattgacctgctcatgcactgtgtcaagggcattggcaaagatcatgccaagttttcaccagtggcaacagccagttacaggctcctgccagacatcaccctgcttgagcccgtggaaggggaggcagctgaggagttgagcaggtgcttctcacctggtgttattgaggtgcaggaagttccaaggtaaaaaggtggccagagttgccaacccccggctggataccttcagcagagaaatcttccggaatgagaagctaaagaaggtttntgaggcttgcccgggttcgagatcattatatcttctctgttgagtca

SEQ ID NO: 95 - DNA, 107 bp, Homo sapiens
acaaaaaaagcacattcctagaaaaaggtattggcaaatagtaaaaatgggaggtcaaaagcaaaaaaaaaaaaaaaaaaaccaaaccaaaaaaagaaaaaacccac

SEQ ID NO: 96 - DNA, 328 bp, Homo sapiens
acaacagtggtttgggaatctgcaaataaatgctcatttaagaaaaactactgaatatgacagcatcagcccaaaccgggacttccagggccatccagatttgcagaaggacacatcaaaaaatgcctggactgatacaaaagtcaaaaagaactctgatgcttctgataatgcacattctgtaaaacagcaaaataccatgaaatatatgactgcacttcacagtaaacctgagataatccaacaagaatgtgtttttggctcagatcctctttctgaacagagcaagactaggggtatggagccaccatggggttatcagaatcgt

SEQ ID NO: 97 - DNA, 499 bp, Homo sapiens
  misc_feature 73, 479: n = A,T,C or G
acctaaagcacagctaggcagctggggaaaaggcagcagtggtggagcaaaggcaagtgagactgatgccttncggtcaagtgcttccagtttaaacagattctctgccctgcaacctccagcaccctcagggtccacgccatccacgcctgtagagtttgattcccgaaggaccttaactagtcgtggaagtatgggcagggagaagaatgacaagccccttccatctgcaacagctcggccaaatactttcatgaggggtggcagcagtaaagacctgctagacaatcagtctcaagaagagcagcggagagagatgctggagaccgtgaagcagctcacaggaggtgtggatgtggagaggaacagcactgaggctgagcgaaataaaacaagggagtcagcaaaaccagaaatttcagcaatgtcagctcatgacaaggctgcattatcagaaagaggaaactggagaggaagtngaaatctatcattgatgaat

SEQ ID NO: 98 - DNA, 489 bp, Homo sapiens
actcatgcccgactgtctaccaggcacacagactttgaggagagggagtatgtcgtcttgatccgcatcaatgatgggggtcggccacccttggaaggcattgtttctttaccagttacattctgcagttgtgtggaaggaagttgtttccggccagcaggtcaccagactgggatacccactgtgggcatggcagttggtatactgctgaccacccttctggtgattggtataattttagcagttgtgtttatccgcataaagaaggataaaggcaaagataatgttgaaagtgctcaagcatctgaagtcaaacctctgagaagctgaatttgaaaaggaatgtttgaatttatatagcaagtgctatttcagcaacaaccatctcatcctattacttttcatctaacgtgcattataaatttttttaaacagatattccctcttgtccttttaatatttgctaaatatttcttttttgaggtggag

SEQ ID NO: 99 - DNA, 496 bp, Homo sapiens
acaaatgatgaccaataattttatctttcttcctttgaatatactgtaaattctatgaaaaattcatttataaaaacaaagcaaagaatagcataaattttattttctttcacaatgttatattttaatagaagaaaaaaactacctttctgataactgtaacctaagtaaaacaaatattttacatataatttgaggcaaagtaatgagtttcttgaatcaactggagaaattagtcacattacctatgtcatgcataaatgatggtaagaagaaaaaaaaagcatctgatcatgtatgagaactgtctctgttcaaattatgagaaataaaatgaaaattgctaaagggagaaaatgaataaaatatgatttaaaaaaaaccatatgggaattgcatagatgagaaaaaaattttcattctagggatctaaaagtaatgtttttagctttaaaaacatacacacacatatataattgagacatgtctatcatct

SEQ ID NO: 100 - DNA, 423 bp, Homo sapiens
  misc_feature 382, 394, 398: n = A,T,C or G
accaaagcattaccgcatggtagagaacacactcgattaaaaatgttaagctatctgaaaaataaaatgtgcaagtcttcaggatggcacaaaacaaaggttaatgcttcttggggcacatttcttagagggcttgctgagtgtgtaaatataatcgacttttgtttgtgttacatgacttctgtgacttcattgaaaatctgcacaattcagtttcagctctggattacttcagttgacctttgtgaaggtttttatctgtgtagaatgggtgtttgacttgttttagcctattaaatttttattttctttcactctgtattaaaagtaaaacttactaaaagaaaagaggtttgtgttcacattaaatggttttggtttnggcttcttttantcangctttctgaacattgagatatcctg

SEQ ID NO: 101 - DNA, 271 bp, Homo sapiens
  misc_feature 165: n = A,T,C or G
gctctagagggggtgctatagggtaaatacgggccctatttcaaagatttttaggggaattaattctaggacgatgggcatgaaactgtgatttgctccacagatttcagagcattgaccgtagtatacccccggtcgtgtagcggtgaaagtggtttggtttanacgtccgggaattgcatctgtttttaagcctaatgtggggacagctcatgagtgcaagacgtcttgtgatgtaattattatacgaatgggggcttcaatcgggagt

SEQ ID NO: 102 - DNA, 527 bp, Homo sapiens
  misc_feature 12, 13, 420, 427, 452, 498: n = A,T,C or G
acatcaagtcannaatgatgttgacatgagttggattcctcaggaaacattgaatcaaatcaataaagcttcaccaagaaggttgcccaggaaacgggcacagaagagatcagtgggatctgatgagtaaatgttcctttgtgcaacaattcggtctttacttaacctgccctaatatttttcggcctgatgggaattagtgcagagaagccatgtcaccatagaaggcaactcctacttgtgtgtggactgagcaatcagagtctgtggcgataatattgctgaaaatgcactgcattcatttttctaaagtaacaaatttggttttttttttaaaccattaaaatctatgtgtgtgcgtgtgtatgtatgtgagcagttggtcttaccaagaatcattgttgagctacctgaaaacangtctttngaatactaaatataaatgctgttgnctcttcctttttgacatttttctgatttttttcccccaaaactcanttaaatatttacccactatgattattgat

SEQ ID NO: 103 - DNA, 395 bp, Homo sapiens
actcagaaaaacatctaaagctgttggagaagagggactcatataaatagttggattgcgttttgctttttatttctttataaaaatatgtcaaaaacagtttttaattttagaaatcttatacttgaaagaaacctcaattatcagtggctttatgaagtaaagttaaaaacaaacataggaaatgtgaaaatatttgtgtttgttttgtctgactaacttgctgctaaatgctatctttaggtgtgtgaaagttctttgatatgttattgtccttttacatcttgttaaatagccattgcttttgagaatcagatagtgtgttgtttaggggttaattgtgtctatatctttcaaaaacttttatattatgtattataagaagttacagtagt

SEQ ID NO: 104 - DNA, 489 bp, Homo sapiens
  misc_feature 476: n = A,T,C or G
acttgaaatttaactattaaaaaagttggaggaactcaaactttgaagttagggctccctttctccagataaagcacattgcctggtttattgtaaggcacttagaacatgtaaccaaaaacactcaatttaggaataggaatgattgttttacagctaagtgcgctctcagagtcttttgttttacacccctctcaagtttacctttagatatttttcttgttgtttaatattttgtgacagatttggcaacttttaaaaagttgtttgaattgaatagtgcataaaattaatagatgtttttcagaaaatccattattaagagtagaggaatgaggagaaatattcgttctaaagagaatcaaaaccacaatgagagattgtcttacccccgttagaatgacagttaccaaaagacagtaacaaatgctgacgagaatgcagaggcaggaacgtttaaaacactgttagtgggnaatgtagacttgt

SEQ ID NO: 105 - DNA, 462 bp, Homo sapiens
acacttttgttacagttacatatatgaatagttagcagaggagaaactcctccgttgttcctacaccaagggaaaaaatgtaaggactgtatagctcatgaataatattaacatttttctatcacaaaatattgataaaattggaattgtatcaattcatgttatggagcttaacattttagccgaaatattaagataatataaataaggcttttagcttcatatcaagacctatttgaacacttctagaaaagaacattaaaagttttttcctcatttatggtttgatttagtgtagtgcctcaactgttcttaatggtgtcttagtataatgcataattattagaatataattataaggcattacagaattttatgtggatacttgcaaagatatttcagtccaaaacttcaaattacacacccaaatatgtttgttgccttaatctatacttggacaaa

SEQ ID NO: 106 - DNA, 279 bp, Homo sapiens
acaagaaacaaatgggtgtggttgtatcccaataaaatgttagcaaaaggcctctctggcttgccaatcactgccttaaaccataaattttcatatgagcctggttttattttcatttttgttgtaataaattactcagtacaccaccattcaccacaggatttatgatttaccaattacatactccaccattttggcaaaaggatgaaattcttaaaactgtttataaacctaatatagtaaagactgtatacatctccatattgcacatttttatgt

SEQ ID NO: 107 - DNA, 411 bp, Homo sapiens
acttcatgctgtctacactaagagagaatgagagacacactgaagaagcaccaatcatgaattagttttatatgcttctgttttataattttgtgaagcaaaattttttctctaggaaatatttattttaataatgtttcaaacatatataacaatgctgtattttaaaagaatgattatgaattacatttgtataaaataatttttatatttgaaatgttgactttttatggcactagtatttctatgaaatattatgttaaaactgggacaggggagaacctagggtgatattaaccaggggccatgaatcaccttttggtctggagggaagccttggggctgatgcagttgttgcccacagctgtatgattcccagccagcacagcctcttagatgcagttctgaaga

SEQ ID NO: 108 - DNA, 210 bp, Homo sapiens
actacctgttgacctggaattttagtgattctgggaaagttttccagacaaagacaccaatagagtgaagggttttttccccaattactattttattgttttttaaaatgcctttttaaaacttgtgtgatgtggcaaaatagtcatatgttcaattaatttatattttattcattccttttcaattctggttattatgtaacctcaagt

SEQ ID NO: 109 - DNA, 475 bp, Homo sapiens
acagcattctggaataaagcaagagtgttcattcacacacacagtagcttcaaaactgttcgatctgtttgttcccatgtagttttctaaagatggaaaaaaaggactttggtcatcaagactactgtggccatattagattactggaacatctaagcatcagtgtgtgaccatgcgaacaaaagacttcggggagtgtctatttttaaaaaggtttatgtgtgtcgaggcagttgtaaaagatttactgcagaatcaagcccacttttaggcttaggaccaggttctaactatctaaaaatattgactgataacaaaaagtgttctaaatgtggctattctgatccatagttgttttttaaagaaaaaaaatgtatatacagaaagagtataaaagtttgtgaatttaatgcaaattagcttccagtcttcacttcccaaatacttgatttatagttttgactcctttacattt

SEQ ID NO: 110 - DNA, 443 bp, Homo sapiens
acaaaaaaaaccttacataaattaagaatgaatacatttacaggcgtaaatgcaaaccgcttccaactcaaagcaagtaacagcccacggtgttctggccaaagacatcagctaagaaaggaaactgggtcctacggcttggactttccaaccctgacagacccgcaagacaaaacaacaggttcttgccagcctctagagaaatcccagaacactcagccctgacacgttaataccaaggggaacagttaacttcaatacaaggtcaaaatcagcaacaagttctacaatccagtgctgatatcagatacaagcttcaaggacaatttcttttcgaaggcttattccagtttcgtgaggctagcatgaggtgtgtgcatttgccaggggcaaatttctattctcaattaacccatgcagcaaatgctacgcatctgctgagt

SEQ ID NO: 111 - DNA, 268 bp, Homo sapiens
acagttatgctcagatgaacactggacccatgtggcagggtcaagcaactagaacatgattcagaaatcagtgaaagatacacttggacaggaccaagaggcatttcactgccatgaaacaaggcaggaagggattctaatacacacaccaggaagcactcctgcccctcagaggtcaaggagctgatcctatattggtatgaggaatggcttattttctgatgaccacatgtgggactatttcaaccgccacaagaaaccccagaag

SEQ ID NO: 112 - DNA, 469 bp, Homo sapiens
actactaattaatagaaaatcattcaaccaagagaagagtcaagtgaatatcgtttgtttatttgctagtgagtttctttgtaacgttgattttattaaatgataatatttggttagtatgtcctatgttaataaaaatgaacaaaattaattttgctatgttcaggtgtcttgataaaataacaatgctccagtgttgttgcttacatttagcactaaattttaacacagcgtcagtgagtccaggttttaacttcttcatgcctggatgggataaaatgtaattcattgttaaattaattcatatttgtatttattaatcactgtgacaacattaaccatttgttcttaccaggaagtggtcagattatcatctgagttacagttagactggctaagtttggtattagatcaaggggaatgtccagtaaacagagaggtaagcatgatggaaataatgaagtggggt

SEQ ID NO: 113 - DNA, 388 bp, Homo sapiens
  misc_feature 97, 116, 145, 148, 172, 205, 212, 227, 233, 252, 324, 346,379: n = A,T,C or G
ctttttttttttttttttttttttttttttttgggggtgaggtaaaatggctgagtgaagcattggactgtaaatctaaagacaggggttaggcctntttttaccagctccgaggngattttcatattgaattgcaaattcgaanaancagcttcaaacctgccggggcttntcccgccttttttcccggcggcgggagaagtanattgaanccagttgattagggngcttanctgttaactaagtgtttgngggtttaagtcccattggtctagtaagggcttagcttaattaaagtggctgatttgcgttcagttgatgcanagtggggttttgcactgagcancgatgagagccttgaaggccctccagttttcangatacgtgt

SEQ ID NO: 114 - DNA, 195 bp, Homo sapiens; identical to SEQ ID NO: 8

SEQ ID NO: 115 - DNA, 399 bp, Homo sapiens
  misc_feature 323, 364, 365: n = A,T,C or G
acctgtgggtttattacctatgggtttatatcctcaaatacgacattctagtcaaagtcttggtaatataaccaatgttttcaaatgtattctgtcatacaaagagcagatttttattgaacttgtgcaataactatattaccatacaatataaatattcatgaatagtttcccaagtctggagcgaccacatagggagaaaatgtaaatgtctcaatttttgttcacaaaagtatattttatcaaattgctgtaagctgtggatagcttaaaagaaaaaaagtttcctgaaaatctgggaaacaagacatttaaagaatcangcaaaatttcaaataaaaaattatgaaaatattatcctcannagttcatttagtcccatgaaattaattattttct

SEQ ID NO: 116 - DNA, 426 bp, Homo sapiens
  misc_feature 1, 2, 11, 52, 103, 248, 288, 375: n = A,T,C or G
nnaaagtatgnattgaccatgagatttcccagtgtttggtgcttaatgccgnttattttatttaagctaagaatgcatatgtaacccatgcacataaccagtngctactatactaatctggttgagcatgaactgatcaagatatcaaaacttatcaaaactagcctgaagctgatgaaactgttaacccactaattgccttaatcttaaagctgttttttaagcatacttaaataatgtatgaaagnatgtataaagtttgaaggataagttattagtgttctgcanagcaataatgcctttttctatttcatcaaatcaaggtcaaaaattcatcttttcaagattaaaaagctctcttaatggaaatatttnaattttgcttatataaaaagcactatagccatgttttccaaaaagtataaa

SEQ ID NO: 117 - DNA, 215 bp, Homo sapiens
ttttttttgctctagagggggtgctatagggtaaatacgggccctatttcaaagatttttaggggaattaattctaggacgatgggcatgaaactgtggtttgctccacagatttcagagcattgaccgtagtatacccccggtcgtgtagcggtgaaagtggtttggtttagacgtccgggaattgcatctgtttttaagcctaatgtggggac

SEQ ID NO: 118 - DNA, 397 bp, Homo sapiens
  misc_feature 7: n = A,T,C or G
gtatagnatttacattctcttttaggtagaagaggcaattttacccttatttcacatggttagaaatttaaagcaagatcatttacccaaggataggtgtttggtaatgttgaaggagttagtctggcttcatgttttacatcttcaactaaaatcccatactatctgcttggatttggagagccaaaaaataaagctgattgtcatgtgattaaatatctgatcaacaggtatgaatataacttaaatcagcatatttttgccatggtaataaattgtcctataaactatttatatatttttgttcttcataattatcactaataagcatcagtttgttgtttttaaaaggatatttaagtgagcattttctagttcatatgaaaataaccatagt

SEQ ID NO: 119 - DNA, 356 bp, Homo sapiens
accaagtattccagtggaagatgatgaaagccagaataacaatttactaccttctgatgaaggcctgaggatagacagaatgactcagaaaactccttttgaatgcagccagtctgaggttatgtttctgagcttggacaaaaagccagagagcaagagaaatgaggaagcttgcaacatgcccagttcttcttgtgaagaaagttggttcccaaagtatatagttccatcccaggacttaaggccctataaggtaaatatagatccttcttcagaagctccagggcattcttgcaggagcaggccagtggagagcagctgttcctccaaattttcctgggatgaatatgaacagt

SEQ ID NO: 120 - DNA, 294 bp, Homo sapiens
  misc_feature 195: n = A,T,C or G
actcaccaggggtgtggtcctatgggtgacattcttgctccatcatttcttacccaggtaaccttgagtatggcgcctaaatcctctcttcctttcaaattgcctggtctgtaaaatggatgcagtgaatggtagctatgccacaggtgttttgtgtgagaattaaatgagaggagttatatcaataacacttanaggcatgcggtgcctatagtgagggcttgttttatgttgtcgtttaaccctttctttctcagccctcccccactccacatcccctcccactggcaatgt

SEQ ID NO: 121 - DNA, 467 bp, Homo sapiens
acaaagcagcaactgcaatactcaaggttaaaacattagaaaagcatttgtgtgacaggtatattacagtattatcaaaatattacattttcagacttacttagcagataatcatccaccagagcttaaatctttaaattatttccatagtcttaaaaaatatgtaatgtcagaatgcatataaaaagaatgtaaaaggaaacctaaaatacaaatggaataatgtaacaaataaatatttgatttcagtaactgttaataatcagctcaacaccaccattctctctaaactcaatttaattcttataggaataatgaactgtcaaatgccatggcataattatttatttccaagctatcatcaatgattagaactaaaaaaaatttggcataaaaaaatcacaattcagcataaataaagctatttttagcttcaacactagctagcatctctaagaattgttgaa

SEQ ID NO: 122 - DNA, 375 bp, Homo sapiens
acgactttttcgagttggcttaggcagaattctcctctgagcgataaagacgacatgcttcccactgaactttttctccaattcgcgtaaggctcagaaaaatcctgcgaagaaaaaaacttctgaggtaataaataggattatcccgtatcgaaggcctttttggacaggtggtgtgtggtggccttggtatgtgctttctcgtgttacatcgcgccatcattggtatatggttagtgtgttggttagtaggcctagtatgaggagcgttatggagtggaagtgaaatcacatggctaggccggaggtcattaggagggctgagagggcccctgttaggggtcatgggctgggttttactatatgataggcatg

SEQ ID NO: 123 - DNA, 451 bp, Homo sapiens
actatactctgtattctcacaaatagagaagactaatattgcagacctggtgacagctctgattgtccttttggttgtatccattgttaaagaaataaatcagcgcttcaaagacaaacttccagtgcccattccaatcgaattcattatgaccgtgattgcagcaggtgtatcctacggctgtgactttaaaaacaggtttaaagtggctgtggttggggacatgaatcctggatttcagccccctattacacctgacgtggagactttccaaaacaccgtaggagattgcttcggcatcgcaatggttgcatttgcagtggccttttcagttgccagcgtctattccctcaaatacgattatccacttgatggcaatcaggagttaatagccttgggactgggtaacatagtctgtggagtattcagaggattttgctgggagtacctc

SEQ ID NO: 124 - DNA, 495 bp, Homo sapiens
  misc_feature 395: n = A,T,C or G
accctcttcaagaatcggatggatgtcgttttgaagggcgacaatcttcctcagtatagaggggtgaacattcggagattgctcaacggtagcatcgtggtcaagaacgatgtcatcctggaggcagactacactttagagtatgaggaactgtttgaaaacctggcagagattgtaaaggccaagattatgaatgaaactagaacaactcttcttgatcctgattcctgcagaaaggccatactgtgctatagtgaagaggacactttcgtggattcatcggtgactccgggctttgacttccaggagcaatgcacccagaaggctgccgaaggatatacccagttctactatgtggatgtcttggatgggaagctggcctgtgtgaacaaagngcaccaaaggaacgaagtcgcaaatgaactgtaacctgggcacatgtcagctgcaacgcagtggcccccgctgcctgtgcccaaatacgaacacacactg

SEQ ID NO: 125 - DNA, 277 bp, Homo sapiens
actgtgggttgggggccttggatcccaaataaatgagtagttcctctgcagtctaagctgaggcatggatcagggctcagggaatgggagtgaggtgagtggcaggggagacacggggtatttttggcaaggcagtgtgtgtggctgtgtgtgtctgcacgggactcaagagacccactggggggctgtgcgtgtgcatatgcgtgagatacacaggtgaattctaacaggccgtgtgtgtgagcgagcacgtgttgggacctcagatcctgagggt

SEQ ID NO: 126 - DNA, 229 bp, Homo sapiens
accttgcagctgacagataataggcaggacatgttagttataaagtagttacagcctaattcacaaaagttaccaactgtttctctttctagaaagaagcaagaagttaagaaattccttgaattagcgcctggtgtgtcaggtgggagtgcagaggagggctgttagagcagtgtcaaaaggaccctggtgggccagacgggttggacatcgttaataatcatagttg

SEQ ID NO: 127 - DNA, 493 bp, Homo sapiens
acactattacaaagtagtggttctctgtatgtctatgtgtatatatgtatatataaaactatacagatacatgtgtgtatataaacatacatatgtatatatacacacatatacttaattttaaagttaatcaaatggttatcaaaaattaatatacaacaaagattcctgggaaggtaatgcttatataaaataaggccatgtttctaaaaatccctcaaatcagtccaagataagatttttaatgaagaacataaaggttaaagaaattctttctctccaggttagctgtttttccctacttgttttcttcttgctttttcctgttgttgtccatattaaacttctttgtgctcttaaaggcccgccatcatgtgaagtggccacgccccttatggacaaagtcaagccaccaactcccaaatgtatcagtgcagctgcttcagaggaaatcactgaaaaataaagaaaaaccatccatgcatggctgcat

SEQ ID NO: 128 - DNA, 181 bp, Homo sapiens
cgcctgcccagtgacacatgtttaacggccgcggtgcctctaatactggtgatgctagaggtgatgtttttggtaaacaggcggggtaagatttgccgagttccttttacttttttcaacccaacacaggcatgggttgacagtgagggtaataatgacttgttggttgattgtagatatt

SEQ ID NO: 129 - DNA, 491 bp, Homo sapiens
ttttttttagaggagacacctgctaggtgtaaggagaagatggttaggtctacggaggctccagggtgggagtagttccctgctaagggagggtagactgttcaacctgttcctgctccggcctccactatagcagatgcgagcaggagtaggagagagggaggtaagagtcagaagcttatgttgtttatgcggggaaacgccatatcgggggcaccgattattaggggaactagtcagttgccaaagcctccgattatgatgggtattactatgaagaagattattacaaatgcatgggctgtgacgataacgttgtagatgtggtcgttacccagaaggttgcctggctggcccagctcggctcgaataaggaggcttagggctgtgcctaggactccagctcatgcgccgaataataggtatagtgttccaatgtctttgtggtttgtagagaatagtcaacggtcggcgaacatcagtgggggtga

SEQ ID NO: 130 - DNA, 413 bp, Homo sapiens
acaaaaaacccttgagattaatttttttctaaaagaagaccttaccaaaaataacttttaaaaaatctgtcaaaccatatgatagacctgaatattttccttaagactgtaaactttttttctgaaaacaattataaaaaagtagtttataagtaggattatttttctttaaaattttccaagatcatattacttgacaaataagtgtcattttgaaatttaaaacatgattttttcctaataaaattattagttattctgacatcttattaacagatcttagttgaattccacttaatttccctggggacagctgagacactgcatttttccaaatagtcttaaaaagttaaagataggcattatttaaaggagtgtcttacagtgaaaaaaagaaatcattcaaagaaaac

SEQ ID NO: 131 - DNA, 203 bp, Homo sapiens
accgctgcgttactcggaaccgccgggccgaacagcatgacgtccgctttggagaactacatcaaccgaactgttgccgttattacatcagatgggagaatgattgtgggaacactgaaaggttttgaccagaccattaatttgattttggatgaaagccatgaacgagtattcagctcttcacagggggtagaacaagtggt

SEQ ID NO: 132 - DNA, 256 bp, Homo sapiens
acctgtgggtttattacctatgggtttatatcctcaaatacgacattctagtcaaagtcttggtaatataaccaatgttttcaaatgtattctgtcatacaaagagcagatttttattgaacttgtgcaataactatattaccatacaatataaatattcatgaatagtttcccaagtctggagcgaccacatagggagaaaatgtaaatgtctcaatttttgttcacaaaaagtatattttatcaaattgctgta

SEQ ID NO: 133 - DNA, 535 bp, Homo sapiens
acagagcccgaccccctgcttgccactctagaaaagcaagaaattatagagcagcttctatcaaatattttccacaaggagaaaaatgagtcagccatagtcagtgcaatccagatattgctgactttacttgagacacgacgaccaacatttgaaggccatatagagatctgcccaccaggcatgagccattcagcttgttcagtaaacaagagtgttctagaagccatcagaggaagacttggatcttttcatgaactcctgctggagccacccaagaaaagtgtgatgaagaccacatggggtgtgctggatcctcctgtggggaatacccggttgaatgtcattaggttgatatccagcctgcttcaaaccaataccagcagtataaatggggaccttatggagctgaatagcattggagtcatattgaacatgtttcttcaagtatacatggaataactttttgcatacacaagtggaaatttgtattgcactgattcttgcaagtccttttgaaaacacagaaaatgcc

SEQ ID NO: 134 - DNA, 363 bp, Homo sapiens
actgaaaacaaatgcttagaggggtgttacttaagccctctactgttaacctacattgtgcactttttttttttgaaacggagcctcgctctgtcgccaggctggagtgcagtggtgcgatcttggctcactgcaacttccgcctcccaagttcaagcgattctcctgcctcagcctctcgagtaactggggctacaggtgggcaccaccacgaccagctaatttttgtatttttagtaaagatggggtttcaccatgttggccaagatggtcctgatctcttgacctcgtgatccgcctgcctcggcctcccaaagtgctgggattacaggcatgcgccactgcgacaggccgttgtacctc

SEQ ID NO: 135 - DNA, 493 bp, Homo sapiens
  misc_feature 17, 72, 462: n = A,T,C or G
acatccagcagctctgngaggacattatccaactgaagcccgatgtggtcatcactgaaaagggcatctcanatttagctcagcactaccttatgcgggccaatatcacagccatccgcagagtccggaagacagacaataatcgcattgctagagcctgtggggcccggatagtcagccgaccagaggaactgagagaagatgatgttggaacaggagcaggcctgttggaaatcaagaaaattggagatgaatactttactttcatcactgactgcaaagaccccaaggcctgcaccattctcctccggggggctagcaaagagattctctcggaagtagaacgcaacctccaggatgccatgcaagtgtgtcgcaatgttctcctggaccctcagctggtgccagggggtggggcctccgagatggctgtggcccatgccttgacagaaaaaatccaangccatgactggtgtggaacaatggccataca

SEQ ID NO: 136 - DNA, 516 bp, Homo sapiens
caagaaccgcttgtagtttggtttaaattctgcacgggaggaccttctgagtttacctgttgggctcctggctgcgcaggcacagcagctacacagaagagatgggagaagaggctaatgatgacaagaagccaaccactaaatttgaactagagcgagaaacagaacttcgctttgaggtggaggcatctcagtcagttcagttggagttgttgactggcatggcagagatctttggcacagagctgacccgaaacaagaaattcacctttgatgctggtgccaaggtggctgttttcacttggcatggctgttctgtgcaactgagcggccgcactgaggtggcttatgtctccaaggacactcctatgttgctttacctcaacactcacacagccttggaacagatgcggaggcaagcggaaaaggaagaagagcgaggtccccgagtgatggtagtgggccccactgatgtgggcaagtctacagtgtgtcgccttctgctcaactacgcag

SEQ ID NO: 137 - DNA, 340 bp, Homo sapiens
  misc_feature 173: n = A,T,C or G
gtcatggaggccatggggttggcttgaaaccagctttggggggttcgattccttccttttttgtctagattttatgtatacgggttcttcgaatgtgtggtagggtggggggcatccatatagtcactccaggtttatggagggttcttctactattaggacttttcgcttcnaagcgaaggcttctcaaatcatgaaaattattaatattactgctgttagagaaatgaatgagcctacagatgataggatgtttcatgtggtgtatgcatcggggtagtccgagtaacgtcggggcattccggataggccgagaaagtgttgtgggaagaaagttaga

SEQ ID NO: 138 - DNA, 320 bp, Homo sapiens
acaattataggattgtaatctaaactggaatttttaggcagtaagtcaccacaaaatgttttagataagacacaataaaattattataaataaaagcttaatgtttgtaaaaaatctcttttttagtatttcttttttcacatgaaagaagtggtggctgctaaaaaaaaagctacagtgtttattaagggtcgttttgatttatgtaaatatttgtaaattggtcagtgcctgtaaatttaaatataaaaagtaaccttgaaaacagttttaactttttcaaaagaactatgtccaacattttttagacctgctgtagt

SEQ ID NO: 139 - DNA, 466 bp, Homo sapiens
cccggagcacggagatctcgccggctttacgttcacctcggtgtctgcagcaccctccgcttcctctcctaggcgacgagacccagtggctagaagttcaccatgtctattctcaagatccatgccagggagatctttgactctcgcgggaatcccactgttgaggttgatctcttcacctcaaaaggtctcttcagagctgctgtgcccagtggtgcttcaactggtatctatgaggccctagagctccgggacaatgataagactcgctatatggggaagggtgtctcaaaggctgttgagcacatcaataaaactattgcgcctgccctggttagcaagaaactgaacgtcacagaacaagagaagattgacaaactgatgatcgagatggatggaacagaaaaataaatctaagtttggtgcgaacgccattctgggggtgtcccttgccgtctgcaaagct

SEQ ID NO: 140 - DNA, 489 bp, Homo sapiens
acccaaaatcccacaataaaaaaatcatttaaagctgtgtgtttcaaacttatcacttagaaataaaaacaaaacaaaacataaaaacaaagatcagtttgcaacataatttaaagaagcttctggtttaaaataccacagcagcaatataaagagctggtggcaatcacattcgggagtgaaatcgaaatcaatatattttgtccacatcagcatccaattacagtagttgttaaattcaatccaaaaagttattgctgaatttgtggcatggaatttgagaagatagtattgttcagcagcacaaccacagcagtaaaaatgagaacaggaggatttcattgcttttgagagctaaagggaccgtgaggaggatatcttgctgattgcctgaagataatcctcagttacattcctgcatattacctgctttaaataaatgcaaatgacaaccaccttttcaggaggggcataataatgtaatccaga

SEQ ID NO: 141 - DNA, 351 bp, Homo sapiens
gccaggtggtcagctttaaagctgtgaagatggtggaagctaatgtttctccagatactgctttctgacctagagccctgagtatttttcctatctcccttcctaaccttcttcactgaatttaagttgcagggccatttatggccatctatacactttctctttgcagcagggaatgtcactgtatcccccgtggtagcagtaatttgggcttttattagcaaagaagattatagggtggatgctgctggagtggtaattgcacttcagaccctgttgaaattcagtaactggaagaatctctttttgagctcagagtcctcttggtgtggaaggttcataggtcattgt

SEQ ID NO: 142 - DNA, 406 bp, Homo sapiens
  misc_feature 297, 352, 395: n = A,T,C or G
ggaaaacccggtaatgatgtcggggttgagggataggaggagaatgggggataggtgtatgaacatgagggtgttttctcgtgtgaatgagggttttatgttgttaatgtggtgggtgagtgagccccattgtgttgtggtaaatatgtagagggagtatagggctgtgactagtatgttgagtcctgtaagtaggagagtgatatttgatcaggagaatgtggttactagcacagagagttctcccagtaggttaatagtggggggtaaggcgaggttagcgaggcttgctagaantcatcaaaaagctattagtgggagtagagtttgaagtccttgagagaggattatnatgcgactgtgagtgcgttcgtagtttgaagtttgctaggcanaatagtaatga

SEQ ID NO: 143 - DNA, 286 bp, Homo sapiens
actaaagaggaagcaattgagcacaattatgggggtcacgatgacgacctgtctgttcgacactgcactaatgcttacatgttagtctacatcagggaatcaaaactgagtgaagttttacaggcggtcaccgaccatgatattcctcagcagttggtggagcgattacaagaagagaaaaggatcgaggctcagaagcggaaggagcggcaggaagcccatctctatatgcaagtgcagatagtcgcagaggaccagttttgtggccaccaagggaatgacatgt

SEQ ID NO: 144 - DNA, 400 bp, Homo sapiens
actaaaaatcaattggatgaactaaatccaaaacatgacactgtaggcagcagttttaagtcttatttttactgtttatatatttgaatgctgctacaacagatgatcttcatccctgaagttttcagctaaacttggtttcctagaatagactgttaactttcaaaatttttattggtgaaatggaaatactgtttttccttgtgaatgaattttcatatttgtaagtgctaagtttataattcaggtttgatcaaggtgtgaataactgaagaaaataacttgctggctatataggaaaatgctgtggaaatgaactgtgtatatacttctgggaggaacaaatttaatcatttcttctgttaagcactaatcagtatagtgcaactcctggttctgt

SEQ ID NO: 145 - DNA, 485 bp, Homo sapiens
  misc_feature 140, 141: n = A,T,C or G
accaacataatacacctttcatattatgtattatcttgcttaatgggttttatcttgattatccagttacttccatcctcttcccaatgttaatttgcaatagttttaaaatgggaacaaatgaatcaatcatcagatanntaaaatgaaattaaatcagctgcctaataatttatggaattcattggaatgtgcttaaaatgctaaagtgtatgtcattgaacatgaaatcttttttcaggcacatacattgttggtattgatgactttttaaaacctgtgggataaacttgcactgcacacggaagttttattcttgtatatttagatttgtatgcttgtgagtaaaaatgtgcatttgtaaatactgtgttttttaggttgaatcaattaagtcttaaaactgtaaatttattaagcttgttgccagtaggtttaaagaaaatcatgatctcacatgcctcactttgacatttatcatgcct

SEQ ID NO: 146 - DNA, 195 bp, Homo sapiens; identical to SEQ ID NO: 8

SEQ ID NO: 147 - DNA, 483 bp, Homo sapiens
  misc_feature 404: n = A,T,C or G
actaacaatgtattaatagaaaggatgacatctaggtgtatagcaattaaatgacttaaatgagttaataaatgtaaaacacagaaaactatctggccccctccatactgttagttgctgttgttgttattcttttaagtgaaaatttttaaaagcatcttttgctgctagactatctgggttcaaatactggtcctgtcactccctaatggtgtgatcttgggccagttatcaaaccttaccaagttctaatctgtagaatgtggataatagccttagtctcagagagttgttgtggggattaaatgagataaagacacaattaaatcagataatggagatcataggagatgcttgaacccagtaggtgctaacctattatttgccttcctacaagtctgcanggagcgatcaactgagtgaaaagcctagaaatcattccacaggaaggacatgaaaaaaatggagcatgaagctgttttt

SEQ ID NO: 148 - DNA, 348 bp, Homo sapiens
acctaaaatggatttgactatattcaagccactttcatatattaactagataaaaggataccatactgctatttgaaattcaatcacaaagcaaaaatgtcataattttaatgtattttaagggaagacggggttcttaacatgaatatgtaatacaaaaacaattctaaataataatatttaatagaagaaaaaatctgtataattatttagaagtaactctgtttttaaaatttcaatgttaggaagaaaatcccttaaatttgaaatagcggaatattctctcatatgaaaaaactgtgtcccagtgttattcttcaacttagaaattaggcaaagtattttagt

SEQ ID NO: 149 - DNA, 289 bp, Homo sapiens
acttgttcctactattatttttgtatatgaagaactggctttggatttaactgaaaacttaggaaaacaatctaatcgctgttgtctatatcattgatttaattcatcaaagttactcaaatgattgatatttttacttgctaattattttaggagtgattttgtgaaatttatttttaatacagtcctagaattgaattgaaatatggtttggaagtttgagggttttttactgtgtctatccttgtgtgtctgtttcctttaaagattcatgatacaatcactgtgt

SEQ ID NO: 150 - DNA, 243 bp, Homo sapiens
acaatggaatatcattcagccttacaaaaggagatgctgctatatttgcaataacatgggtgaacctggaggacgttacgctaagtaaaataacaatattgaaggaaagaaataatactgaaagaaaaatattgcttgatctcacttatatatggaacttaaaaactacacatagaaacagggtagaatggtagttatccaggctgggaggaagagaaaacagggaggtgtaggtcaaagggt

SEQ ID NO: 151 - DNA, 185 bp, Homo sapiens
  misc_feature 9, 10, 12, 88, 179: n = A,T,C or G
ttttttttnntnttgaaaaagtcatggaggccatggggttggcttgaaaccagctttggggggttcgattccttccttttttgtctanattttatgtatacgggttcttcgaatgtgtggtagggtggggggcatccatatagtcactccaggtttatggagggttcttctactattangacttt

SEQ ID NO: 152 - DNA, 493 bp, Homo sapiens
  misc_feature 11, 12, 385, 465: n = A,T,C or G
accagtgtggnnaaatgggctggttaactgtgtgggcccagacagtcatttgtctatattcctagtgatgagaaattattccccctaaccttccaatgaaacaagtgtccacatagttctcatttttccctattgttgaaacattagtgagagggacccatgcatgttattaaaaattaagttcaaaacacttaaaataattctgtattagaaacttgactctatcataagtctcttcttttggaagtcatactgggctggttaaatgctccaattccattgttattaacatttaggaagcagaagactattccagctagttcaaactagaggtttagttactacaacactgattcctggttggttgtgtgggttcggtaaggtntactcctcttcctctggcagaatttgctcctggatttttgtggttcattctttggcaattttttagctattgccatgaanatttcatttacattcattgatgttttag

SEQ ID NO: 153 - DNA, 163 bp, Homo sapiens
  misc_feature 101, 136: n = A,T,C or G
acagtggcctgttatctttttaatgaatatatacaagccaacatccaatttctattattacaattagggttcttgtagctgtttatgttaatatggagaanaaaactatattggctgattttttctgatcttaaancagaataccttttctttttttgcttca

SEQ ID NO: 154 - DNA, 362 bp, Homo sapiens
  misc_feature 193, 194, 308, 323, 336, 337: n = A,T,C or G
acagaactcacacgaaaaaagaaattaaattttagctttctggagagcagcccctctctggcaccatcaaacacttctttgtttcccttcaacttggaactcttcaaacatcaggggttgtgagggtttggccattcttttatcttgggtccatgtgagtgacagaaatggtgcggcctgggaaagatcttgnngagagatccctggcccaggacaggagatgccaaatctaatttatctcactgagggcctttgagaaaaacgcttcctgggccaggctcagtggctcatgcctatataatcccagnacctgcccgggcggncgccgggcaggtnntaatttgattcctccatccttgaat

SEQ ID NO: 155 - DNA, 213 bp, Homo sapiens
acacatctattttttatactttttttttaaaaaaagaatgtcagttgttatttattcaaattatctcacattatgtgttcaacatttttatgctgaagtttcccttagacattttatgtcttgcttgtagggcataatgccttgtttaatgtccattctgcagcgtttctctttcccttggaaaagagaatttatcattactgttacatttgt

SEQ ID NO: 156 - DNA, 165 bp, Homo sapiens
acaatgatagtgccgggttggcagttaactctttcaccctactaaattcaagagctcatctccaccctgtcctgtatattttctacatttctattaagaggctacttggtagtgtcagcgggcatcttttacaccttctagtagctcaagccagtaaaaccttgt

SEQ ID NO: 157 - DNA, 406 bp, Homo sapiens
  misc_feature 12, 13, 49, 50, 74, 75, 85, 86, 196, 206, 300, 303: n = A,T,C or G
accacatacctnngtttcagaaaccacccattctacattaaaatctaanncctttatcatctatggctctttgnnattatagaanntctacataggtatttatttgcctttcttcctatcaatcagatttatttattttaaaagcccttgataagtagtaaaatatttaactgcttttcttaaccatacaagtcanaattagattntaaaattctatgaaaaatttttggataacaaatctaactagagacttaatgatttgtgttaggattctgtgagccatacttcagcttattattngtntctcagcaatccccagatttgattgtcttgttctaccagagtaagcttaaccagtttttattatctaaaatgcttaataagtgccccctccccgccaagtgat

SEQ ID NO: 158 - DNA, 341 bp, Homo sapiens
acagggtttactctcagaaacctacctggaagcccatcggattgtgaagatgaacaagagtgaggatgatgagtctggggctggagagctcaccagggaggagctgaggcaaattgcagaggaggatttctacgaaaagctggcagcttcaatcgccccagaaatatacgggcatgaagatgtgaagaaggcactgctgctcctgctagtcgggggtgtggaccagtctcctcgaggcatgaaaatccggggcaacatcaacatctgtctgatgggggatcctggtgtggccaagtctcagctcctgtcatacattgatcgactggcgcctcgcagccagt

SEQ ID NO: 159 - DNA, 540 bp, Homo sapiens
  misc_feature 516: n = A,T,C or G
acgtagtctaggccatatgtgttggagattgagactagtagggctaggcccaccgctgcttcgcaggcggcaaagactagtatggcaataggcacaatattggctaagagggagtgggtgttgagggttatgagagtagctataatgaacagcgatagtattattccttctaggcatagtggggaggatatgaggtgtgagcgatatactagtattcctagaagtgagatggtaaatgctagtataatatttatgactactaaattaataaatttattccacttttgaaatgacagccaaaaatccacctaattgattctcatttggcacgttcttctcaattctgttcactaaattaaaattactaaatttaaactgccaagagccatgatgttgtctgcacaagacaacattttccatcactttcagaaagttatatttggcatgttaaggaaaaaaaatataatcccacagcagcagctatttaaaataagacagccaacaggattcatgcanaaatatttttaaatattcctgttg

SEQ ID NO: 160 - DNA, 235 bp, Homo sapiens
acttaagcatttccacttttggaagaaaagtgtattagtattttatattgcatttcatttaaaaggacagtttttttttttgtaaatccattcattgaaatggtttctaaactgtataatgtaatttggagcctatttagtaatagaattaaatgtcctatgtagtgctacaatttttgaattagaaagtgatcaaaagtaaaaaaaaaaaaaaaaaaaaaaaaaaaaaagcttg

SEQ ID NO: 161 - DNA, 259 bp, Homo sapiens
acgtgaaagtgctcatccaggtgggatatgagcctcttcctccaacaataggacgaaatatttttgggcggcaagtgtgtcagcttcctggtctctttagttatgctcagcacattgccagtatcgatgggaggcgcgggttgttcacaggcttaactccaagactgtgttcgggagtccttggaactgtggtccatggtaaagttttacagtattaccaggagagtgacaagggtgaggagttaggacctggaaatgt

SEQ ID NO: 162 - DNA, 313 bp, Homo sapiens
actctataaatctagtggaaacatttctgcacaaactagattctggacaccagtgtgcggaaatgcttctgctacatttttagggtttgtctacattttttgggctctggataaggaattaaaggagtgcagcaataactgcactgtctaaaagtttgtgcttattttcttgtaaatttgaatattgcatattgaaatttttgtttatgatctatgaatgtttttcttaaaatttacaaagctttgtaaattagattttctttaataaaatgccatttgtgcaagatttctcaaaaaaaaaaaaaaaaaaaaa

SEQ ID NO: 163 - DNA, 532 bp, Homo sapiens
  misc_feature 520: n = A,T,C or G
acataatcgttttgtggagtcggcacagttcaggttatggaggcacgtaattcaccaaagtgcaaaaaaggcaaaggaaaacacactgcattgtagaataaggcattcaaatgtgctgttaacgtttaaggcagctaatggccaaaacaggcaagtcaagaaaagtggtctggtttggaggtgattttgcatctagaaggcattctcttctcgtgacctcaaagactgagcactgtagagcatgtcttcttcctcaaggccaatgatacttcagataccagatggtttcatttttcaattgcggtccaaagagagggttgagttgggccagaattgcaatcagccaaaagagatagcagcaaactgaacaggtcaccaacatggtaatgataactccccggttaggacccttagggatgaaccaaggtaccaagaagccgacgaagccccagaacacgctcatcacaatgagaggcacagtgaggccgtgatacgccatggtcgccgcctgagcgccaanccctaccccgtc

SEQ ID NO: 164 - DNA, 554 bp, Homo sapiens
  misc_feature 485, 500, 516: n = A,T,C or G
acaggtgactgaaatgagccctgcggggagcccagctgcccaggccaccgtcccagtcaccatcaggattgtggacctcaacaaccacccgccaacattctatggagagagcggaccccaaaacaggtttgagctgtccatgaatgagcacccaccccagggagagatcctgcggggcctcaagatcaccgtcaatgactccgaccagggagccaatgccaaattcaacttgcagctggtggaacccaggggcatcttccgagtggtcccacagacagtcctgaatgaagcccaagtcacaatcattgtggagaactcagctgccattgactttgaaaagtccaaagtattaaccttcaagctcctggctgttgaagtgaacaccccagagaagttcagttccacagcggatgttgtgatccagctcctggacaccaatgacaatgtccccaagttcgactccctctactacgttgccaggattnctgagaacgccccanggggctccagcgtggngggctgtcacagctgtggatccagatacaggaccctgg

SEQ ID NO: 165 - DNA, 170 bp, Homo sapiens
acatgtctagcgcctggcagaggggggcagcagggcagcagcgggctggagccagccctatttgtagaggatatcgtagtgtccaggccggtagagaaggtagaccttgggctcggagccctcagggaagatgtgcggattggtggtgccgccctcgccgcggtccatgt

SEQ ID NO: 166 - DNA, 95 bp, Homo sapiens
actgtgagctttcataaggttaatgattgaggatgccagtgaagggtgcagggacaaaacctaatagtcttggatggtggggggaggatggccac

SEQ ID NO: 167 - DNA, 462 bp, Homo sapiens
  misc_feature 379: n = A,T,C or G
tcgagcggccggccggcaggtactccagatctctttcggcttcctatgagaaacaccagaagcattactttccacttctacttacagtaattgcaagaggagacctcacattcaggactggcctagtgaacgtaatccatgctttaaactggccattaaacagtcccacatggttggattttttttttttttttttgagttgtgctttcacaaaaccttgtcaaagacctcatgcaatatcactttgaaagttattttctgtttactacacaaacattgtaatataactgttaatactatttatatatttgaaaggtataaaaggtaggagttaaaaaaaaaacctctatgtgtagatattaactcagaacttacaatntacagggagaagacatgttgcaatacaagctaattctagctgctcagtaacctctggagttttttaaagggacattttcctgt

SEQ ID NO: 168 - DNA, 516 bp, Homo sapiens
  misc_feature 15, 16, 479, 486: n = A,T,C or G
actcgggaagctggnncgggccggcggtgcagtcacgggggagcgaggcctgctgggcttggcaacgagggactcggcctcggaggcgacccagaccacacagacactgggtcaaggagtaagcagaggataaacaactggaaggagagcaagcacaaagtcatcatggcttcagcgtctgctcgtggaaaccaagataaagatgcccattttccaccaccaagcaagcagagcctgttgttttgtccaaaatcaaaactgcacatccacagagcagagatctcaaagattatgcgagaatgtcaggaagaaagtttctggaagggagctctgcctttttctcttgtaagcatgcttgtcacccagggactagtctaccaaggttatttggcagctaattctagatttggatcattgcccaaagttgcacttgctggtctcttgggatttggccttggaaaggtatcatacataggagnatgccangagtaaattccatttttttgaagatcagct

SEQ ID NO: 169 - DNA, 509 bp, Homo sapiens
actaatgtgatcacagaaaaatagcaaactgaagtcaaaaagcacaggctgcccatcatagagtccccagtctatttaatattttcgacctgctctgaggatggagggtgtcaacaccttagaataccatgatgggctttaaaactgggtaaagaatcatccctagggttagggcaaatgtaacttcacttattgcttacacacagggaaaaaatctgtttccttttccaagatattcttttaaggattacttgacagtggttcttttaaaggtatcaaaagatgtcctaaaaaaaaaaaaaccctctttggaattctctcggaattccagaaagattatctggcaattcattcctccaccccatcaaaatttttcctttgaaaaattacaactggcaactcacataagatttaatcaacttacttaaaataagggagggcttctcaataatgttttccccactagaaaactaagaaattcagtgatactcagtgccagtaattaagtg

SEQ ID NO: 170 - DNA, 230 bp, Homo sapiens
acagtgtgatgatactaaaccagctagggtagaagcacttgctttctctcagcaaggcatgtgctgcatagcctctttgaaagacagaagaataaattacaaagataaattaagcaggatctttgatttgaactcataacctggtaggggagccagatacattaatgaatggtaaaatatcatagtagaggtttgtagaaaagacatggcagctccagcaagagagcagt

SEQ ID NO: 171 - DNA, 571 bp, Homo sapiens
  misc_feature 502, 510, 513, 533, 548: n = A,T,C or G
acttcagttggtgcacaaaatactgtcatttgctcaaagcgtgagtaaaatatcctaattacctgtaagctttattttgacttaatacttctttaattgatgtgccttgagttggaaagagttttattggcttaaatctgaatcatgttacaaagtaagtgtgggaacacataaatttcaaataatctttgaccccggaactttagagttaatttttttttcccgtaatcatgaaatcagttatttttcagtttggcattaaggtttctttttcagtgactgccaaatgtttggtgatgaaggcagaaatgaatggctcaaaacttgggagaagagcaaaacctgaaggggccctccagaacaatgatgggctttatgatcctgactgcgatgagagcgggctctttaaggccaagcagtgcaacggcacctccacgtgctggtgtgtgaacactgctggggtcagaagaacagacaaggacactgaaataacctgctctgngcgagtgngancctactggatcatcattgantaaaacacaaagcangagaaaaccctatgataataaaa

SEQ ID NO: 172 - DNA, 335 bp, Homo sapiens
acacgacataaggccttttataaatagctttgcttttctcatttcactagtaaacagtgaaaaaatctttatagaagctagttttctataaagtgaaggcagacctagtatattgatctttaaatgaaaccaatttaaactttcaatgacatgaactataattttgcaaaagaatttatacttaatttaccatgtgtgtggatggatttttaaaaatatataagcagattacatatgttgcttatgtataatcactggatgcatgcacaatgaaataatgcaaaagtccataggaaaatagcacttccaactccaaaaaggtgattggcaatggt

SEQ ID NO: 173 - DNA, 233 bp, Homo sapiens
acactcttttctctccctgttttgcagcaacaaattgcgaagtgcttttgtttgtttgttttcgtttggttaaagcttattgccatgctggtgcggctatggagactgtctggaaggcttggaatggtttattgcttatggtaaaatttgcctgatttcttacaggcagcgtttggaaaccttttattatatagttgtttacatacttataagtctatcatttaaagacatgt

SEQ ID NO: 174 - DNA, 490 bp, Homo sapiens
acacttttgctgagagctacaaaaagaagataagccccaaggaagaaattagcctgagcactgtggagttaagtggcacggtggtgaaacaaggctacctggccaagcagggacacaagaggaaaaactggaaggtgcgtcgctttgttctaaggaaggatccagctttcctgcattactatgacccttccaaagaagagaacaggccagtgggtgggttttctcttcgtggttcactcgtgtctgctctggaagataatggcgttcccactggggttaaagggaatgtccagggaaacctcttcaaagtgattactaaggatgacacacactattacattcaggccagcagcaaggccgagcgagccgagtggattgaagctatcaaaaagctaacatgacaaggacctgagggaaccaggattcctccctcctaccagatgacacagacaagagttcctggagaatgggagtgttaagacttttgact

SEQ ID NO: 175 - DNA, 498 bp, Homo sapiens
acagttaacattgtgcaattggaatgaccaagatactagtaaatcctttggtgatcacataagtgtaatcttccccactttataccagaagactaaagctacagtttaaaagttcatttgaagttttgttttgctcagtggcaaagatcaaatgggaccatccctctccctgttgaccactctaattgagtcctgagtggaaaaagcttaaatataaagggtttggcaacttttagaagaaggagactcttgaaagaaggttaccaggaaaattgaggattaaaaagatttagaaataatagctatcaaattcgaatttgagaatattaattttgacttaaaagcataatacacgagtccccaatgcaaatatgcttaatccctcactctatacatacttatttacacttcttgttcctttttaagaagtgaatgtagttaagaaaaatgttaaatgtaaacctacttttctgattcccccacccctcaaccaggact

SEQ ID NO: 176 - DNA, 441 bp, Homo sapiens
catgattttgcttaaattaatacttttaagtaatggaacttttttcaaaggcaaatttaaactatttaagaaatagctcctaatacttgggatcttgtttagagaatccactttctggaagttctcagcataattagtgttgagagtggttcagttgtctttaatgtttgtcatgtggaaatggaagtagcctctttttgttctgaaattgagtttattcaaagtgtaaaagcacatactgcattttctgctgaaagatcattatgtttaacaggcacttaatctcagtaaagtcagttgccagttaagttccacccagtagtcagtcccctttgtagttagtgggattatttgataattggttagatcatacttgtaaattttaatgctttgtgtaattggtttgaaaaacagtgaaatgggtaaacgcaaaacttttgt

SEQ ID NO: 177 - DNA, 195 bp, Homo sapiens; identical to SEQ ID NO: 8

SEQ ID NO: 178 - DNA, 367 bp, Homo sapiens
acagaatatttaatgagtctgtcttgccccaaaagggaaaaacacaagtagctaagccatttgcagagaggaaaaatgtcatggaaaaatgaaaaatctctctaatgtctatagcacatgaaatatctaaataggtgggtgcagtggttcatgcctgtattgggagaccaaggcaggcagatcacttgacgtcaggagttcaagaccagcctggccaaatggcgaaaccccgtctctattaaaaatacaaaaattagctgggcatggtggtgggtgcctgtaaacccagctacttaggaagctgaggcaggagaatcatgtgaacccaggaggcggaggttgcagtgagctgggatcacaccactgt

SEQ ID NO: 179 - DNA, 390 bp, Homo sapiens
acagttaaattaagaatattaaatcttccacacatgggctcaaataggaagtattttgtttagtaaaatgaaaattacttttaaaaaatatctgcagtgtttttgaaatgcaaggcaccaatagagagcagacattccagctgagtgattgtctggaaaaaaaaaatggaaccggtcagtcctctgtccttgttaattagaatacttccttcttcgtgtctatgcaacatcttccagataatccgcaacatcactgagctgggatacagtcagatcttgtgtgaggtcatcaagcttatcactggtattgatgtcatctatttccacagaaaggtcttcttctatctcttcaccaatacttatctcacttttctctgagcgatggctggt

SEQ ID NO: 180 - DNA, 195 bp, Homo sapiens
accattggtggccaatagatttgatggtaagggagggatcattgacctcgtctgttatgtaaaggatgcgtagggatgggagggcgatgaggactaggatgatggcgggcaggatagttcagacggtttctatttcctgagcgtctgagatgttagtattagttagttttgttgtgagtgttaggaaaagggcgt

SEQ ID NO: 181 - DNA, 554 bp, Homo sapiens
acctggacaacagagaccaagaaggcttctactgtgtgaggcctcaacacatgccctgtgctgcactcactcacatgtattctaagaacaagaaagtttcttatcttagcaaacaagaaaagagcctctttgaaaggtcaaatgtgggtgtagagattatggaaaaattcaatacaattagtgtctccaaatgcaacaaagaaacagttgcaatgaaagagaaatgcaagtttggaatgacatccacaatccccagtgggcatgtctggagaaacacatggaatcctgtctcctgtagtttggctacagtcaaaatgaaggaatgcctgagaggaaaactcatatacctaatgggagattccacgatccgccagtggatggaatacttcaaagccagtatcaacacactgaagtcagtggatctgcatgaatctggaaaattgcaacaccagcttgctgtggatttggataggaacatcaacatccagtggcaaaaacattgttatcccttgataggatcaatgacctattcagtcaaagagatggagtacctg

SEQ ID NO: 182 - DNA, 195 bp, Homo sapiens; identical to SEQ ID NO: 8

SEQ ID NO: 183 - DNA, 498 bp, Homo sapiens
accttacaccaataacccctaacagcctggggtctcagtggaactaacttaagtgaaagaaaattaagacaggcatagaattaggcctttgttttgaggctttaggggagcagagctccattgtggcatctggagtttcatctgaggcctacaggggtttcaaatggttgcatttaaggtcagaatctttgtgttgggaaatgctagcgactgagccttgacagctgagcacgggttgcctcatccctctcatgctgtctatttcttaatctaacaactgggcaatgcgttaaactggcttttttgacttcccagaacaatatctaattagcaaataacacaattcagtgacattcagcaggatgcaaattccagacactgcaatcatgaacactgtgaagacagtcctctccgtgggccgggacacaaagcagtccacagtgttgggacaaggccaggcgttgcacttcaccagccgctgcatggagaagccgtcgt

SEQ ID NO: 184 - DNA, 110 bp, Homo sapiens
acgggtatttgaaagtaacaaattatactacttacatacagagaaaaagacataactaaactacttcaaacccaatgcagaggaaactttcaaggcaaatgatgacttag

SEQ ID NO: 185 - DNA, 557 bp, Homo sapiens
  misc_feature 521: n = A,T,C or G
acaaagattggtagcttttatatttttttaaaaatgctatactaagagaaaaaacaaaagaccacaacaatattccaaattataggttgagagaatgtgactatgaagaaagtattctaaccaactaaaaaaaatattgaaaccacttttgattgaagcaaaatgaataatgctagatttaaaaacagtgtgaaatcacactttggtctgtaaacatatttagctttgcttttcattcagatgtatacataaacttatttaaaatgtcatttaagtgaaccattccaaggcataataaaaaaaagaggtagcaaatgaaaattaaagcatttattttggtagttcttcaataatgatgcgagaaactgaattccatccagtagaagcatctccttttgggtaatctgaacaagtgccaacccagatagcaacatccactaatccagcaccaattccttcacaaagtccttccacagaagaagtgcgatgaatattaattgttgaattcatttcagggcttncttggtccaaataaaattatagcttcaatgggaaga

SEQ ID NO: 186 - DNA, 493 bp, Homo sapiens
  misc_feature 409: n = A,T,C or G
actcctctctacccctaaggttgggctctgcctcagaggagtgagttttttttttttttctataaagtttacattgtcttactatttattgagtgaatttctggtcattgcccatgcaaatataagaaatctggctttaaatattagtcagtttcatggctatgactagattgttttcttgtataactaaatacccgtataaaatgaactaatgttttctctcccctccctaccccttccttatgaacaatgctttaggtatattgaaatctttaagagcagtagagctgaagttagaactcattatgatccaccacgaaagcttatggccatgcagcggccaggtccttatgacagacctggggctggtagagggtataacagcattggcagaggagctggctttganaggatgaggcgtggtgcttatggtggaggctatggaggctatgatgattacaatggctataatgatggctatggatttgggtca

SEQ ID NO: 187 - DNA, 488 bp, Homo sapiens
  misc_feature 374, 375, 422, 430, 431: n = A,T,C or G
accttgaatttaaattttttttaaacttcagtcttcaatattgaaactgctaagttaccccatttttccatgaaaaaaaatagaaaaataaacttggggaaaaaattaaaaataaaaaataaacttgggaaaacattactaaataggtttaagaaaaaagcctatataggccaggtgcggtggctcacacctgtaatcccagcactttgggaggccgagccagacggaccacctgcccgggcggccgcccgggcaggtactttggtagctatttaaataagaggggggtgggaatgaatgtcgagatacgagcacctgcatcttttagtcaattgtcagtggagtcagtggggtgctaagtgttctgaactganntaggtgcactaaggttccaagctccctgcaaaggatctggacgggangaaaagcnnaggcccctgaagggaaaaaagcctgcttcccaatacttattttttattactgtacct

SEQ ID NO: 188 - DNA, 498 bp, Homo sapiens
actccttatgctagcagattcaaagatatgcctaactttattgcccttgagaagtcatcagttctccgccactgctgtgaccttttgataggcattgcggctggatcaagtgataagatttgcaccagcagtctccaagttcagagacgattcaaggcaatgatggcatctattggaagactttcacatggtgagagtgctgatctgctaatcagctgcaatgcagaatcagccataggttggatcagctcaagaccatgggttggagaattaatgttcacacttctatttggagactttgaatcccctctacacaagctacgcaagtcaagttagttgccaagaaagcacagatgacaacctattaatgctgtgagaatgtttctagatcagtgcatggatggctccattgctctacgggccattgtgtctgagatcccagtctttgaggagaaaaaaaacaatggttaaaaaggcattggggaaatattttgagtt

SEQ ID NO: 189 - DNA, 501 bp, Homo sapiens
  misc_feature 82, 177, 261, 288, 296, 346, 382, 419, 481, 488: n = A,T,C or G
acagcaaccttggttcctctgggggttgagaataagaatagtggggagggaaaaactcctccttgaagatttcctgtctcanagtcccagagaggtagaaaggaggaatttctgctggactttatctgggcagaggaaggatggaatgaaggtagaaaaggcagaattacagctgancggggacaacaaagagttcttctctgggaaaagttttgtcttagagcaaggatggaaaatggggacaacaaaggaaaagcaaantgtgacccttgggtttggacagcccanaggcccanctccccagtataagccatacaggccagggacccacaggagagtggattanagcacaagtctggcctcactgagtggacaagagctnatgggcctcatcagggtgacattcaccccagggcagnctgaccactcttggcccctcaggcattatcccatttgggaatgtgaatgtggttggcaaagngggcagnggaccccacctgg

SEQ ID NO: 190 - DNA, 513 bp, Homo sapiens
acataagaaaatatttacaactaataaaaagcagattgtagaatatacatgttctatgtaggaaaataagtaaaatgttttatagtgcagaccaaacttttctaggccaagttttatccatgcaactcttttacaataccatctcattaacattcctggaacacatacatgcatggaagaaatctaacaattatcttgatttaaagctcatactgcctttttagggcctgtatatcttctaaagtaaaatggttgtttggtgtgtccgaaaggtcctcaaacagctgttcaattagctccttttggcccttgctaattagtgtcaacatcatcttaaacctttctgctttactcaggtataaaagatgctgatacaccaatgagggatctttttcaataagattatttttcagagactgaatgaggagaaggaatgtatccccttcaagtttgttacttaaaaacatcggcaaatcttttggtgcagtgatggctaaaagatgtgcacaggct

SEQ ID NO: 191 - DNA, 312 bp, Homo sapiens
actagaaacggaagtggaaacacatgcacagtttatcttttcactcttgtgaggtcagcagacatctgtaacgcactttccctacagcagctaacaaaggcaggatgatggtatctgttctgaacgtttgaaacaacatcaccacttatctttacagatttcctcaggttctcaatggagggcctgaaaaacatcactgtcaaggatgatgctgctacattttatgagctggagacgaacgagccctctcctgatgcctctccagtcacaggaataatggttttgaaaacgtcaatgctccatctgccttgt

SEQ ID NO: 192 - DNA, 386 bp, Homo sapiens
acttaatcaataaagtgaatgctttgtgcagttttaacaaagctgctgctaaaaagacagttgtgagtggtcaggtatatctgcaatagtaagcaagttcttacctttccagttctgtatgcttctgaaaacaccagctaaggtattaaatacccattttcaagtgaccttgtttttactatttcatatttatgacatctagtgctgagattctgggggctttaatagataaccttattaacccagataattttttttggagcccataaaataaaattgagaatggcatttcgggaaggtctacatatatgtatttagtaagttaattcgtaagttcactttacatagtaaattaatatttaccagtttttaattgctttcagtgt

SEQ ID NO: 193 - DNA, 454 bp, Homo sapiens
gcagatgcaggtggaggcagagcggcggaaacgggccacagttctagagtctgaggggacccgagagtcggccatcaatgtggcagaagggaagaaacaggcccagatcctggcctccgaagcagaaaaggctgaacagataaatcaggcagcaggagaggccagtgcagttctggcgaaggccaaggctaaagctgaagctattcgaatcctggctgcagctctgacacaacataatggagatgcagcagcttcactgactgtggccgagcagtatgtcagcgcgttctccaaactggccaaggactccaacactatcctactgccctccaaccctggcgatgtcaccagcatggtggctcaggccatgggtgtatatggagccctcaccaaagccccagtgccagggactccagactcactctccagtgggagcagcagagatgtccagggt

SEQ ID NO: 194 - DNA, 195 bp, Homo sapiens; identical to SEQ ID NO: 8

SEQ ID NO: 195 - DNA, 290 bp, Homo sapiens
  misc_feature 182, 183, 244, 245, 255, 256, 267: n = A,T,C or G
ccaggccagctggtctttaattatgtggttccgaagcaaattccttgtatgggcatcaattggaggggttccatctttgaatacagaattcaggggagccaggagggtcaaccgctcacttccagagagatgattgccgaggccggcttgtctgaaaaggtcaatggctgtggacacatcannctctgcagccaattcaaatagtgtcttggctgagtctgggatgagtagctcatcaatgtannggatcacccnnttggtggctangatgtctttattggagatgatcg

SEQ ID NO: 196 - DNA, 492 bp, Homo sapiens
tcgaaacttacctgcgggactgccctgacccttgtataggttggtgagcacacgtctggcctacagaatgcggcctctgagacatgaagacaccatctccatgtgaccgaacactgcagctgtctgaccttccaaagactaagactcgcggcaggttctctttgagtcaatagcttgtcttcgtccatctgttgacaaatgacagatctttttttttccccctatcagttgatttttcttatttacagataacttctttaggggaagtaaaacagtcatctagaattcactgagttttgtttcactttgacatttggggatctggtgggcagtcgaaccatggtgaactccacctccgtggaataaatggagattcagcgtgggtgttgaatccagcacgtctgtgtgagtaacgggacagtaaacactccacattcttcagtttttcacttctacctacatatttgtatgtttttctgtataacagccttt

SEQ ID NO: 197 - DNA, 470 bp, Homo sapiens
acctgtgggtttattacctatgggtttatatcctcaaatacgacattctagtcaaagtcttggtaatataaccaatgttttcaaatgtattctgttatacaaagagcagatttttattgaacttgtgcaataactatattaccatacaatataaatattcatgaatagtttcccaagtctggagcgaccacatagggagaaaatgtaaatgtctcaatttttgttcacaaaagtatattttatcaaattgctgtaagctgtggatagcttaaaagaaaaaaagtttcctgaaatctgggaaacaagacatttaaagaatcagcaaaatttcaaataaaaaattatgaaaatattatcctcattagttcatttagtcccatgaaattaattattttctctgcttgatcttggtggacagtttcatgaagctgtcagttagttcattaaagtttttggaaattctcagacag

SEQ ID NO: 198 - DNA, 448 bp, Homo sapiens
  misc_feature 393: n = A,T,C or G
attaggggaattttttaaaatctgtaatgtttggacaaacagatgatattactttgctataaaattataaatgtaacttttaataaagatagccagaatattctaaattagaaattacgtttttgtttccctcaagacataaaacaaatataaacattctaaactgctggatgaatctgaaaagacattaagttcaaattttaatttattctcatattaaatataactccattaaaagtttaaaatttcatgggagaaaatataataaggtaaagaggtagaatcactttcagacttaagaataatgttgatttcccaagtgctttaccttatctgttaaagcgtaagatgaattggtatttgcttcataggcagtttgactgcatgtattanagaatgaaaagaagatatttgtagtaatgcctggaaacttggtgctttaaattaa

SEQ ID NO: 199 - DNA, 270 bp, Homo sapiens
acctttggagataatgataaaattcaacaggttgaaccgtctaacaacagactttaatgtaattgtggaagcattgagcaaatccaaggcagaactcatggaaatcagtgaagataaaactaaaatcagaaggtctccaagcaaacccctacctgaagtgactgatgagtataaaaatgatgtaaaaaacagatctgtttatattaaaggcttcccaactgatgcaactcttgatgacataaaagaatggttagaagataaaggtcaggt

SEQ ID NO: 200 - DNA, 473 bp, Homo sapiens
acagacaaggtctatagaatgtggtaaaaacttgactgcaacacaaggcttataaaatagtaagatagtaaaatagcttatgaagaaactacagagatttaaaattgtgcatgactcatttcagcagcaaaataagaactcctaactgaacagaaatttttctacctagcaatgttattcttgtaaaatagttacctattaaaactgtgaagagtaaagaaaactaaagccaatttattatagtcacacaagtgattatactaaaaattattataaaggttataattttataatgtatttacctgtcctgatatatagctataacccaatatatgaaaatctcaaaaattaagacatcatcatacagaaggcaggattccttaaactgagatccctgatccatctttaatatttcaatttgcacacataaaacaattatataaacaactttgtaggactatgcccttttgtgt

SEQ ID NO: 201 - DNA, 463 bp, Homo sapiens
gttttaccactctgcagagaaagctaaggttgctaaccaaacaaaataactttacactgacaatgccaatttttacatttctttcagaacaagggacactcaaactaccagagaaacggaccaatggactgcgaagaactcctaaacaggtggatccaggtttaccaaagatgcaggtcattaggaactattctggaacaccacccccagctctgcatgaaggaccccctttacagctccaggccggggataccgttgaacttctgaaaggagatgcacacagtctgttttggcagggcagaaatttagcatctggagaggttggattttttccaagtgatgcagtcaagccttgcccatgtgtgcccaaaccagtagattattcttgccaaccctggtatgctggagcaatggaaagattgcaagcagagaccgaacttattaatagggtaaatagtacctg

SEQ ID NO: 202 - DNA, 460 bp, Homo sapiens
  misc_feature 16: n = A,T,C or G
actacggaatatctcnaaaaactgcactagagacaaagacgtgatgttaatatcttttccccacaattattacggataaacagtagcaccaataaataaatgataacaaatattaaaattaaaaaaggagagagatttagtatgtagaattctctattttttcttgttttgtttttacatataaaaaacagaatagcaatgtctattttatcagaatcacatatatacataaacatatatatatatatatacacacaaatacaagttgccaaatatatatatagtatgtagatgtatattgaaaccttatttcaaaggaatgtgtgctggggagccaggggatcggggagggcagagctgagtgttagcaaaattaaatatctgttcaagataagctagtgactgtcaccgatcagggagagagagattggaaacatgaattttatatacaaaaaccggt

SEQ ID NO: 203 - DNA, 374 bp, Homo sapiens
actgtccagtatagtagcccttagccatatgtgactactgagcacttaaaatgtggccagtcagaattgagatgtgctgtgagtgcaaaatacactcaaatctaagacttagtatggaagaaaaagaagataaggtgtttcattaataatcttttatattgattacatgttgaaatgatatttttaatatactgggttacataaactgttattaaaattaattttgcttgtttcttttttaatatggctactagaaaattaaaaattatgttgtggttcacattatatttctgttgaacaatgtggacatagataatctacagtcattacattagccttagaatttagcatcatacttttaagcactctggggt

SEQ ID NO: 204 - DNA, 293 bp, Homo sapiens
aaaatgtctgaaggaatataaatgaagttgtcattagtagttatcttaggggtccgggattatagaggaacttttatcttctacatggcctttttctatagtgtttgaattttaattacaagaccagtgatttataaattcatacactccacagccccatccattacaatagcacataatataataacattagccatggacttacctaaattgcttttgtcatgtgtctgctggtgatgcccaacccagtgctctgcacccaggtcacactgtggctttgtcctctgcttatg

SEQ ID NO: 205 - DNA, 546 bp, Homo sapiens
  misc_feature 8, 9: n = A,T,C or G
actattgnnaaaatgaccaacaaaaactttaagaacagcctgaaatctgctggaaacttccctcatcccattattaggatgaccagggatcacttcaatagattttcaggtgagaaagctggaggataatttctaggattacaatatttttgttttacctaaggttggtcattaaaagaaagtaagatttaatttatttaacaagaagaaaataattcatttgactagtcatttaaacctattctatttaacagaagagggaacaattttgttcagtagtgacctcattagaagagcccattttgaagagttctaatgtatattctcaatatataattagcattcccccaaacccctaatgtaagttgtaaattaaacattatgttgtttactggcatttctattttctacttcagttctctttatttgaaacatgacaaaatttcatttacataagatttctatattataaagattaaaaatttaaaggaaaaatattggttttggtggtttaaaactaaaaaaaatggaagcatgatcattggt

SEQ ID NO: 206 - DNA, 195 bp, Homo sapiens; identical to SEQ ID NO: 8

SEQ ID NO: 207 - DNA, 282 bp, Homo sapiens
accacgttccttcaaagagtgaatctattgaaccctggggaatatagttgaccaaatgatgggtgtcctctctgagcttcatgttttcagcgaagacatctggtgccacaccagttcttgaatcaagccttgatttaagatcacataaacttgctgttattttatcaagagcagaccccggtgtagcatcttgtgtgactttaagagagtatagagtggcagccaaaccagaaccataagaaaacaccccaattctcttccctgctaattgctgaggtgagt

SEQ ID NO: 208 - DNA, 560 bp, Homo sapiens
actctggtttcaagtagcacactggaaaagaaaattgaagatcttgaaaaggaagtagtaagagaaagacaagaaaacctaagacttgtgagactgatgcaagataaagaggaaatgattggaaaactcaaagaagaaattgatttattaaatagagacctagatgacatagaagatgaaaatgaacagctaaagcaggaaaataaaactcttttgaaagttgtgggtcagctgaccaggtagaggattcaagactcaatgtggaaaaaatattttaaactactgattgaatgttaatggtcaatgctagcacaatattcctatgctgcaatacattaaaataactaagcaagtatatttatttctagcaaacagatgtttgttttcaaaatacttctttttcattattggttttaaaaaagcattatccttttatctcacaaataagtaatatctttcagttattaaatgatagataatgcctttttggttttgtgtggtattcaactaatacatggtttaaagtcacagccgtttgaatatattttatcttggtagta

SEQ ID NO: 209 - DNA, 503 bp, Homo sapiens
acctgtgggtttattacctatgggtttatatcctcaaatacgacattctagtcaaagtcttggtaatataaccaatgttttcaaatgtattctgtcatacaaagagcagatttttattgaacttgtgcaataactatattaccatacaatataaatattcatgaatagtttcccaagtctggagcgaccacatagggagaaaatgtaaatgtctcaatttttgttcacaaaagtatattttatcaaattgctgtaagctgtggatagcttaaaagaaaaaaagtttcctgaaatctgggaaacaagacatttaaagaatcagcaaaatttcaaataaaaaattatgaaaatattatcctcattagttcatttagtcccatgaaattaattatttttctctgcttgatcttggtggacagtttcatgaagctgtcagtttagttcattaaagttttggaaattctcagacagtgcagtggtatcagaaacttgtattcaagagt

SEQ ID NO: 210 - DNA, 343 bp, Homo sapiens
acatacacacatacacacacacaaccccaacatgaacagtgtatacttgatatctgagggggatatgcagtaattttaacaatacatgtcgatggcctgaacaaaggtgaatgctgcctgtgttaagcattgcttaaaaaatctacttttaagcaaagcaagttgccttccttaggtcagccactgcctggtccgaccagtgcagcttggccagcctcactatgagtggtcttattcccttgtcctctccaggccgatatactaatatataggctcacaaggagctgtagggtttccctcctgccctcttaggtagagaagtataggcacttctctacccagt

SEQ ID NO: 211 - DNA, 296 bp, Homo sapiens
acacagttgtgcctgccagcattgcaactccagtgccctcagtgaaacccgagtatcttaccctgctggtaagtggcaccaccgcatacatcagcctgaaagagctcggaggactgtcggaagggaaaaaagttttggtgacagcagcagctgggggaacgggccagtttgccatgcagctttcaaagaaggcaaagtgccatgtaattggaacctgctcttctgatgaaaagtctgcttttctgaaatctcttggctgtgatcgtcctatcaactataaaactgaacccgtaggt

SEQ ID NO: 212 - DNA, 253 bp, Homo sapiens
acagccagaaaaattagaacttattatggatgaaatgaaacagattctaactccaatggcccaaaagtaagaaagttgtttttgttttgttcttaagaaatgacattcaaaggaggaaggttttccataactgttgcccagaagaggtagctatttcctgcttacaagtattaatctattctaaataagagtgcaaaagtgttggtttgaaaccattcttggtgcaaaaggagatttctttttctgatattgt

SEQ ID NO: 213 - DNA, 183 bp, Homo sapiens
  misc_feature 10, 11, 15, 22: n = A,T,C or G
accattggtnncccnttgattngatggtaagggagggatcgttgacctcgtctgttatgtaaaggatgcgtagggatgggagggcgatgaggactaggatgatggcgggcaggatagttcagacggtttctatttcctgagcgtctgagatgttagtattagttagttttgttgtgagtgtta

SEQ ID NO: 214 - DNA, 276 bp, Homo sapiens
acctctcaacattaccaaaatcatttctttagagggaaggaataatcattcaaatgaactttaaaaaagcaaatttcatgcactgattaaaataggattattttaaatacaaaaggcattttatatgaattataaactgaagagcttaaagatagttacaaaatacaaaagttcaacctcttacaataagctaaacgcaatgtcatttttaaaaagaaggacttagggtatcgttttcacatatgacaatgttgcatttatgatgcagtttcaagt

SEQ ID NO: 215 - DNA, 202 bp, Homo sapiens
  misc_feature 8, 10, 11, 184: n = A,T,C or G
accattgntnnccaattgatttgatggtaagggagggatcgttgacctcgtctgttatgtaaaggatgcgtagggatgggagggcgatgaggactaggatgatggtgggcaggatagttcagacggtttctatttcctgagcgtctgagatgttagtattagttagttttgttgtgagtgttangaaaagggcgtacctgcc

SEQ ID NO: 216 - DNA, 488 bp, Homo sapiens
acttttagatcacaaatttgcctttaagtaacacataatacacttaaggcagatttgccttacaggtggcctcagcttctaaacaccactacactgctttatataaaaaacaaaaatcacatagaagagaatctagtgacatctttcttggtattttaaacttaaaaactgcataataaattgagttcccataaaatttcgcccttgagataggaaacaaacactactactattttatagttgcctttatctgacttgattgatgcagttataatagtattaataacataatctttaaatttgtgagggaaaaccaatactttatattcactcctcataaaaggttcaacagcaagcataatgaggagccattataaaatcatattgctaagtattactttaactcataattctgcttatataagtgtatgcatatcacagttaacaaatactatttaattatcaagacatatgcaaaagtatttttt

SEQ ID NO: 217 - DNA, 195 bp, Homo sapiens
  misc_feature 5, 66, 155, 189: n = A,T,C or G
gcttntccgagggtaaaatagagacccagtaaaattgtaataagcagtgcttgaattatttggttncggttgttttctattagactatggtgagctcaggtgattgatactcctgatgcgagtaatacggatgtgtttaggagtgggacttctangggatttagcggggtgatgcctgttgggggccantgccct

SEQ ID NO: 218 - DNA, 349 bp, Homo sapiens
acacatgtgttatctacctcaaggtaacaagagtatgtggcaaaacatataccacccatagtgcttcacaaaatgcacttctatttagccagcgtttattgtagtaaactattcttaataaaactcactcactgtttataaatgttctggtatgcattctttatagtgaagtgttaatacatcacatcttatttattttagcaaatcagtatattttctgtatttaattataaaaaattaacttagtttttaaaatttatttgcaaatatactttttccatttggcactatggtttgttgcctacctagctgcatctataatgtcagcttatcctaaggctgtccacgt

SEQ ID NO: 219 - DNA, 292 bp, Homo sapiens
ttctttataactgacttagtcatttgccgcttagcagtttatatactgaaatgaaaacatcttgtggggaaaagtgactttagattatgaactcaattcaaatgaactctatttaaaatggggtcctattttggacaaaggaaattaagaatgtaaaagtcagaacagtcttgaggtaaaaagtgtgctttggcttaaaagggatacagtatattaattacatcttttattattattgtttatttcttagaatcatttctggctttctcaaaacaaaataatattaatgagt

SEQ ID NO: 220 - DNA, 451 bp, Homo sapiens
acaagtcattactcccccttctcccatatgaacaagaattttttaacggtcagaatatattgggcatcaaattaaaaacttttttttcaaaagtctacagaatggatattggagcaaaaattacaaagtgggtcagatacaggtttttaaaaactgcattactgaatttaacaaaagtcagacactagaatcatatatttgctgcataaaagttgatttgatacctggtggtgattgaatttagtctcaaagactcataaataaaaatctgacttaagacgtagtcataccagtataccaattctcccatcactttgactttcggcagagagattagagcaaaaaatattcaggagaacagtggagttacattgtattatgtatgtttaatataatatcaattttaaggttaaggttaaggaaatcttaattttaaggttaaaccttgagt

SEQ ID NO: 221 - DNA, 484 bp, Homo sapiens
actcgcggccgggcatggtggctcacgcctgtaatattgattttaaacaacctcagaaggaacgcaagcccagggtgcaaataacagcagactactgccctcctcaacctatttcccttaggctgtttcaggcccttctccctggtccctcattttccttgctcccaacacagcttactttttgcactgctaaatgtataatggaattcctaggattctgataaagccttgcttagaagactaaaagtcaatctacgacaaagatacttaacgagtcttagtgtcacctaagaatctcctaggcaaagcaatcttaaagggcagggaagatattatatttaaaatccaagctgcttttctaaaaagaagagatgatcacaaattacaagatcttcattatcataaaaaacaaataactattttgtcagacacctaaaacttgtcaagtaatttttaacatctcaatatgtaaaaagaacatact

SEQ ID NO: 222 - DNA, 273 bp, Homo sapiens
acagggaggaatttgaagtagatagaaaccgacctggattactccggtctgaactcagatcacgtaggactttaatcgttgaacaaacgaacctttaatagcggctgcaccatcgggatgtcctgatccaacatcgaggtcgtaaaccctattgttgatatggactctagaataggattgcgctgtcatccctagggtaacttgttccgttggtcaagttattggatcaattgagtatagtagttcgctttgactggtgaagtcttagcatgt

SEQ ID NO: 223 - DNA, 617 bp, Homo sapiens
  misc_feature 584: n = A,T,C or G
acagatgtgcaggaatgctaggtgtggttggttgatgccgattgtaactactatgagtcctagttgacttgaagtggagaaggctacgatttttttgatgtcattttgtgtaagggcgcagactgctgcgaacagagtggtgatagcgcctaagcatagtgttagagtttggattagtgggctattttctgctagggggtggaagcggatgagtaagaagactcctgctacaactatagtgctcgagtggagtagggctgagactggggtggggccttctatggctgaggggagtcaggggtggagacctaattgggctgatttgcctgctgctgctaggaggaggcctagtagtggggtgaggcttggattagcgtttagaagggctatttgttgtgggtctcatgagttggagtgtaggataaatcatgctaaggcgaggatgaaaccgatatcgccgatacggttgtataggattgcttgaatggctgctgtgttggcatctgctcgggcgtatcatcaactgatgagcaagaaggatataattcctacgccctctcagccgatgaacagttggaataggntgttagcggtaactaagattagcatggtaatta

SEQ ID NO: 224 - DNA, 465 bp, Homo sapiens
acctgtgggtttattacctatgggtttatatcctcaaatacgacattctagtcaaagtcttggtaatataaccaatgttttcaaatgtattctgtcatacaaagagcagatttttattgaacttgtgcaataactatattaccatacaatataaatattcatgaatagtttcccaagtctggagcgaccacatagggagaaaatgtaaatgtctcaatttttgttcacaaaagtatattttatcaaattgctgtaagctgtggatagcttaaaagaaaaaaaagtttcctgaaatctgggaaacaagacatttaaagaatcagcaaaatttcaaataaaaaattatgaaaatattatcctcattagttcatttagtcccatgaaattaattattttctctgcttgatcttggtggacagtttcatgaagctgtcagttagttcattaaagttttggaaattctca

SEQ ID NO: 225 - DNA, 344 bp, Homo sapiens
acagcaaagcgacccttggtgtcatagatcagacggaaattctctcccgtcttgtcaatgctgatgacatccatgaatccagcagggtaggttatatcagttcggaccttgccatcgattttaatgaaccgctgcatgcaaatcttctttacttcatctcctgtcagggcatacttaagtctgttcctcaggaaaatgatgagggggagacactctctcaacttgtggggaccggtggatggacgaggagcaaacacaccggtcaatttatccagcatccaatgctttggagctgccacccgcttcagatgcttcttgggaccacgagccatggctgcgacctg

SEQ ID NO: 226 - DNA, 501 bp, Homo sapiens
  misc_feature 432: n = A,T,C or G
actgccaggtaacgctgttgtttccgttgagcctgaactgatgggtgacgttgtaggttctccaacaagaactgaggttgcagagcgggtagggaagagtgctgttccagttgcacctgggctgctgtggactgttgttgattcctcactacggcccaaggttgtggaactggcagaaaagtgtgttgttggagttgagcttgggcggctgtggtaggttgtggatacttcaacaggggctgctgtggtgccgggaggtgaaggtgttgtgtcacttgagcttggccagctctggaaagtggtagattcttcctgaaggccagcgcttgtggagctggcaggggtcagtgttgtgtgtagcgagccagtgctgctgtgggtgggtgtagatgcctccacgaggcctgaggttatggtgtcgtcaggtaagantgtggtttcagtgtcgcctgggctgctgtggaaggttgtagattgttgaccaagggatgaggctgtggt

SEQ ID NO: 227 - DNA, 455 bp, Homo sapiens
accccacagaattcacatgggataatgatgctctcctccacagggtgtgaattgctcaggcccatcaaagagtctaactggttacttgcagcctgttgcaagaagttctggaagatgacatcaggttcctccacccctctgggggaagagctgccagtattgagtgaaggtaaggcacgtgaagggttacagcttgtctgatggtcaatcagcagttcctctgggtagagctcctcacaaaattcacaaggcaacatgatctcgtcagctgcaccctttatgtcactgagagacctgggaccgccatgagactggtcggcctcacatacggccctccagaagtcctgctctgccacactggaggcttggccttcattttgcagacttagggccaacatgaagtccaagtttgcactctcttcaccaccctctttggggggctgttggcctctatt

SEQ ID NO: 228 - DNA, 253 bp, Homo sapiens
actgttacctgtttgtctcggaaagagtgagggaatcagcagggagtctgagatgtcatttctgttgtaataaatggagcttggatgaaatggcactatattatgactacagcagatggcccattttgaaacttgcattgaggaggctgcagaagtgttgagtgctgaggtatacccctatgttttcatccgattgctttctgctattataggaatgggacgcgagagataaagattctatccgacgagtagt

SEQ ID NO: 229 - DNA, 167 bp, Homo sapiens
acctcatggattaccaagatttgctgaaccctattggtgttactggatcaaatccaaataaagaaactccatgcttagagttggagtttgactggttcagcagtgtggtaaagttcccagatatgtcagtgattgaagagcatgccaattggtctgtatcccgagaa

SEQ ID NO: 230 - DNA, 286 bp, Homo sapiens
acaggaatatgttatgcaataaagtgaggaagagaaaaagggaataagaagggaggaatgtaactagagcagctcccaacagtttgcctatgtatttgccagcaccaaaatttgtagagtaagccacttacatttccactgctagtattaaggaaagacagcagtggtgatttttataaagtgagtatacatttatttttattctgatatgtgaatttttctttcacgagttaattaactggtaatttgtaaacagtgggaagaagattagaacaattatggaggt

SEQ ID NO: 231 - DNA, 304 bp, Homo sapiens
tctgcttctaacgccttcatggtatgtggggttctgtatgccacccgtaccatactacaaatatttaaatgcaaaattaccaacctatatagcagttttatttgccctataggttgcatactaacttaagcattcatgtcaccataaaatgcctttagcatttctcaatgactggatgggaaattttcctttattgcctagctgcttgtgtttgagtggttgtcctatgagcaatgcatttggagttcttcagctttcactacttctctgttgcttgctaatcatgtaactactaaaatactgt

SEQ ID NO: 232 - DNA, 237 bp, Homo sapiens
  misc_feature 12, 25, 82, 174, 175, 176, 189: n = A,T,C or G
acaggcacaganctctccacaccgntggccactgactgtttcttaaactgccccttggccttgaccatgatctccacgcggntgtgggagaacttctcaatgacagactcaatccagatcagtggcttgacctgggtgctgaggcggtatgacatgagctcaaagtcaccatcnnncgggatgaagganatggtgcggtcgttgtcaaagcgagagagccgcacgcactggtggaat

SEQ ID NO: 233 - DNA, 518 bp, Homo sapiens
actcagctctgagcaggagtttcagatgttccccaagtctcggctcagctccgtcagcgtcacctactgctctgtcagtcaggacttcccaggcagcaacttgaatttgctcaccaacaattctgggacgcccaaagaccacgactcccctgagaacggtgcggacagcttcgagagctcagactccctcctccagtcctggaacagccagttgtccttgctggatgtgcaacgggttccttccttcgagagcttcgaagatgactgcagccagtctctctgcctcaataagccaaccatgtctttcaaggattacatccaagagaggagtgacccggtggagcaaggcaaaccagttatacctgcagctgtgctggccggcttcacaggaagtggacctattcagctgtggcagtttctcctggagctgctatcagacaaatcctgccagtcattcatcagctggactggagacggatgggagtttaagctcgccgaccccgatgaggtggcccgcc

SEQ ID NO: 234 - DNA, 130 bp, Homo sapiens
  misc_feature 117, 118: n = A,T,C or G
ggttttttttttttaagaggaaaacccggtaatgatgtcggggttgagggataggaggagaatgggggataggtgtatgaacatgagggtgttttctcgtgtgaatgagggttttannttgttaatgtgg

SEQ ID NO: 235 - DNA, 255 bp, Homo sapiens
tgaaatgttaaggaagaagatagatccaattaaaaaaaattaaaaccaatttaaaaaaaaaaagaacacaggagattccagtctacttgagttagcataatacagaagtcccctctactttaacttttacaaaaaagtaacctgaactaatctgatgttaaccaatgtatttatttctgtggttctgtttccttgttccaatttgacaaaacccactgttcttgtattgtattgcccagggggagctatcactgt

SEQ ID NO: 236 - DNA, 474 bp, Homo sapiens
acttttttgtttacttgtgaaaatggccatctttaagcatatttattttctgccactttatttaaaggcaagcaatattttcttgatcataaatattttgtaatgaaatacttcctcttttccagggctttgtatgcacttgtataattacattgatggcaatgtagagtttgaatttcagtctgtaaatacttttttggaaaatagaaatttttattgctttaaagttttggatatgggtggttttcttttccgggtttggtggaaagtaatttgagaactttaaggttgtctttttaactgctggcaaaatgttgattttttaatattagataaaacgagtaaacgaaattccccagaaattagtagtaagtggggtctttgtgggttgggaagtagttttaatgtagaaagacatttacatataagtctgtttaatttcaaaggagtttgtgaaaaaaaatccatggtgaa

SEQ ID NO: 237 - DNA, 238 bp, Homo sapiens; identical to SEQ ID NO: 67

SEQ ID NO: 238 - DNA, 349 bp, Homo sapiens
  misc_feature 13, 22, 79: n = A,T,C or G
acaaagacaaacnaacaaactncattggcatttaagccaatcaaaaaaggaaagaagagaaatccctggtctgattcanaatcagataggagcagtgacgaaagtaattttgatgtccctccacgagaaacagagccatggagagcagcaacaaaaacaaaattcacaatggatttggattcagatgaagattttctcagattttgatgaaaaaactgatgatgaagattttgtcccatcagatgctagttccacctaagaccaaaacttccccaaaacttagtaacaaagaactgaaaccacagaaaagtgtcgtgtcagaccttgaagctgatgatgttaagggcag

SEQ ID NO: 239 - DNA, 434 bp, Homo sapiens
actgaatggctggagacaacactttatcagttttgacactgacaggagtggaacagtagacccacaagaattgcagaaggccctgacaacaatgggatttaggttgagtccccaggctgtgaattcaattgcaaaacgatacagcaccaatggaaagatcaccttcgacgactacatcgcctgctgcgtcaaactgagggctcttacagacagctttcgaagacgggatactgctcagcaaggtgttgtgaatttcccatatgatgatttcattcaatgtgtcatgagtgtttaaatcaagaggaagctgcatgaatgtaatcaacattccaactggagctctcctttgcttgtcctctttgccttcggtaatatgtataaacttacatcacgactttctcttaacagctgttgtaaagtttattactttatgt

SEQ ID NO: 240 - DNA, 224 bp, Homo sapiens
  misc_feature 59: n = A,T,C or G
acccgagtgcagttggcagcccgtggctccaggtccttgggatccacaaggtggctcanaagactgctctccaggtggccccggggagcggtggaatcaaattgggcattgggcttatctaacagcaagggcagggccacggcaaatccagccatatccacagggaagggcctgctgggctcccatgctgtgcggaagcccactacccggccgtcctgtacctg

SEQ ID NO: 241 - DNA, 346 bp, Homo sapiens
  misc_feature 324, 325: n = A,T,C or G
acaaccaaaacaacgtccttagtatcttaaggtttaagatttccgaaaagaaaaaagccatgttctaacaaaagtgttcaccacagaaaaattaaacataggggaaggtaaacattaaagtttcaaaaaaacaggtaaatcatacagctgcttctgtgcttgatgttctaatctggcacaagtgtttcgtaactataatatacgttattatttttaaaaaatactgtcatgacaacagcttacattattaaatattgaggaacactttatatcaatttaactcatacttaaaaatgtaacatacgtaaattctatagctctatnnttttttttttttttggaatgt

SEQ ID NO: 242 - DNA, 411 bp, Homo sapiens
ttttgagagccagaacggaagtcttggttttatttatagttgataacttacatccggcctgctcctcaggaagcacagcagggaggagacagagcccaaaggagacggcgacaaaaatgcccaaacccctgagctaatgtggtgactgagagcaagcctaaagctcccttctgagctccccagcagccaaagcaaagagagaaacagggtcctgcagcatgatgtcacagaaaaccagggaccctggagcctgggttccaataagaaccttacattctgacgccttagatttctccctggaaaatggggagaaaaatactgaattggttgggagggccatgcaacacacccagcacagtgtctggatgcatttcagaggccccaccagtctagggtctacagaaagacagt

SEQ ID NO: 243 - DNA, 429 bp, Homo sapiens
actaaaatttttaaaggagagaaactttaacaaaaatcttgataattaaaaattcaaattgtgctagatagaatgtattccaaaatttctgctaaaaatttttgcttttagtttgtaagacataattcaggagaacctcaaagaaaaatttagcaattaagtttggaaaagctataaaagagacctttactttttgaacagacatttttccctttcccaaaatgtgtattattcaagaagcatatttataaatttcattaaagaaaatatcggccaggtgcggtggctcacacctaatcccagcactttgggaggctaaggtgggtggatcatgaggtcaggagttcaagaccagcctggctaacatggtgaaatcccccgtctttactaaaaatacaaaaattagctgggcgtggtggcaggtgcctg

SEQ ID NO: 244 - DNA, 464 bp, Homo sapiens
acatcaaagattacatgaaatcaatcaaagggaaacttgaagaacagagaccagaaagagtaaaaccttttatgacaggggctgcagaacaaatcaagcacatccttgctaatttcaaaaactaccagttctttattggtgaaaacatgaatccagatggcatggttgctctattggactaccgtgaggatggtgtgaccccatatatgattttctttaaggatggtttagaaatggaaaaatgttaacaaatgtggcaattattttggatctatcacctgtcatcataactggcttctgcttgtcatccacacaacaccaggacttaagacaaatgggactgatgtcatcttgagctcttcatttattttgactgtgatttatttggagtggaggcattgtttttaagaaaaacatgtcatgtaggttgtctaaaaataaaatgcatttaaactcgaaaaaaa

SEQ ID NO: 245 - DNA, 375 bp, Homo sapiens
actccacattgagaagcatctccgtgaggttgctgcgggccagcacatacatgagcacaggcaggaagtcatccgccccatagggcttccctgggttgccgagggccatggagtcgtagatgagtttgcaggtcttgagcaggatggagatcttcttctcaggtgagtaggccttgtgcatgctggtgaacttctgcaggatcttctccatcatgggcacctccggcacgctggtggtcacacctaggtcagtggtggtggtggccaggatcactaactggttctccttgagctgctgcagcgaaccatccttgctgtggatctgatgcaggcatgagttgatggcttccttcaggggcttcaggacacatttgt

SEQ ID NO: 246 - DNA, 99 bp, Homo sapiens
  misc_feature 51, 76, 77: n = A,T,C or G
cttagtaaatggaaatatgcagaactacgtgataccatcaatacttcttgngatattgagctcctggcagcttgcnnagaagaatttcataggagacta

SEQ ID NO: 247 - DNA, 334 bp, Homo sapiens
  misc_feature 9, 14, 244, 289, 314: n = A,T,C or G
actgatttncatcnttgcatttacaactgctacaaaaatgccagcactccatcgacatgaagaagagaaattcttcttaaatgccaaaggccagaaagaaactttacctagcatatgggactcacctaccaaacaactttctgtcgttgtgccttcatacaatgaagaaaaacggttgcctgtgatgatggatgaagctctgagctatctagagaagagacagaaacgagatcctgcgttcacnttatgaagtgatagtagttgatgatggcagtaaagatcagacctnaaaggtagcttttaaatattgccanaaatatggaagtgacaaagt

SEQ ID NO: 248 - DNA, 308 bp, Homo sapiens
  misc_feature 18, 19, 27, 28: n = A,T,C or G
ggacgggaggcgagcaanntggcgcanncgcagggcacccggaggaaagtctgttactactacgacggggatgttggaaattactattatggacaaggccacccaatgaagcctcaccgaatccgcatgactcataatttgctgctcaactatggtctctaccgaaaaatggaaatctatcgccctcacaaagccaatgctgaggagatgaccaagtacctaacaaacccacaggtcctaaactaccaaacctgcattaaaaatttcggttggggcgacctcggagcagaacccaacctccgagcagt

SEQ ID NO: 249 - DNA, 408 bp, Homo sapiens
actggaaaagatgggaaatacaaaagtgtatatgtaggagaagaaacaaatatcactttaaatgatctcaagccagccatggattaccatgcaaaagtccaggcagaatataattctataaagggaactccttcagaggctgaaatctttaccaccttgagctgtgaacctgatatacctaatccaccaaggatagccaatcggaccaaaaattcactcactttgcaatggaaggcacctagtgacaatggttctaaaatccaaaactttgtattagaatgggatgaaggaaaaggaaatggagaattttgtcagtgttacatgggctcacagaaacaatttaaaattactaaactttcaccagcagtgggctgtaaattcagactatcggccagaaatgactatggt

SEQ ID NO: 250 - DNA, 563 bp, Homo sapiens
  misc_feature 505, 526, 540, 542: n = A,T,C or G
acggtagaactgctattattcatcctatgtgggtaattgaggagtatgctaagattttgcgtagctgggtttggtttaatccacctcaactgcctgctatgatggataagattgagagagtgaggagaaggcttacgtttagtgagggagagatttggtatatgattgagatgggggctagtttttgtcatgtgagaagaagcaggccggatgtcagaggggtgccttgggtaacctctgggactcagaagtgaaagggggctattcctagttttattgctatagccattatgattattaatgatgagtattgattggtagtattggttatggttcattgtccggagagtatattgttgaagaggatagctattagaaggattatggatgcggttgcttgcgtgaggaaatacttgatggcagcttctgtggaacgagggtttttatttttttggttagaactggaataaaggctagcatgtttatttctaggcctactcaggtnaaaaaatcagtgcgagcttancgctgtgatgagtntncctgcaaagatggtagagtag

SEQ ID NO: 251 - DNA, 490 bp, Homo sapiens
acccgggaggcaccccgtcagcccgtgtgccgggggctcagcctggagctcttggaggaaaatgctacctaataggcagttccgtaattaggcagctaaaagtttttcctaggcatttatgcaagcctcccaggccattttcagcactcatcgaagactctattcctacatgtagtcccgaagttggaggccctgagaacccctacctgatagacccagagaaccaaaacgtgaccctgaatggtcctgggggctgtgggacaagggaggactgtgtgctcagcctgggcagaacaaggactgaagcccacacagccctgtcccgactcagggccagcatgtggattgaccgcagcaccagggctgtgtctgtgcacttcactctctataaccctccaacccaactcttcaccagcgtgtccctgagagtggagatcctccctacggggagtctcgtcccctcatccctggtggagtcattcagcatctt

SEQ ID NO: 252 - DNA, 202 bp, Homo sapiens
ttttttttgcagagtctgatcttatttatttgttactcaaaaaatcttatttctgactggattcagacttagaagtagaagctcgcagagaggaaagtctgcgtctcttcgcaatttgttcctggcgcttctccttagcctccttcattctcttggccaaaagtttagcatattctgcagcctcttctttatttttcttggt

SEQ ID NO: 253 - DNA, 426 bp, Homo sapiens
acttccagctgatattggtgccctttgattgaaaatgacccaaatcaacccttggttaacgtaggcattaaaagaatgtattgagagaaccttggacatctcagagacaccaaccaagaaccaaacaatccagctttgaaagggcaaggatcagagtggctctgagcttcagggagcaggaattgagaaagatgaggatgtcttcatgtcacgtggctcaagatgccaattctagggagaaaaggtgtatcgagcccagcctgagttttttaccaccctcaaaaaggtgtggacagagctccttaatcagcagatgatcccatcaagaacacagagaggagaggagatcaatacccaaagagtagcaaaggtcctattagcaaagaatgttaaaagagatgctaggcaggcaaaaataatagcagt

SEQ ID NO: 254 - DNA, 195 bp, Homo sapiens; identical to SEQ ID NO: 8

SEQ ID NO: 255 - DNA, 195 bp, Homo sapiens; identical to SEQ ID NO: 8

SEQ ID NO: 256 - DNA, 533 bp, Homo sapiens
actttgttatttttccatcactaaaggccaatcagaatttggaaccatgctgctacccaagaaatctaatggaatgaattagttctgtagatgacaatttcttcacccatttatgagacctaaatcttttccataacactcatgtattcagtataacaacatactaactgaaagagggacctgattgtttaaagtttgattgcagacactgtagaacataactcattatgtttcagataaggtaactcctagatatcaaactaatttgttggggtagagattttacaagtcatgccattagaagattttctctgatattatatgtgcagttcagttacaagataaaatcatgtttttttaacaaaagagataaaatacaattgaagcaaaaaataacagctagtatataatatatacagtctgtatttgcttttcacagtaggcctgatgactaaaagatatgctttattacacgctattttcacctcttgaaagtcaaaggtgatgattaatttcatttagcagggaagtgg

SEQ ID NO: 257 - DNA, 356 bp, Homo sapiens
gggcacgacactggaggtgggctgcagcggggacatgctcactatcaacgggaaggcgatcatctccaataaaggcatcctagccaccaacggggtgatccactacattgatgagctactcatcccagactcagccaagacactatttgaattggctgcagagtctgatgtgtccacagccattgaccttttcagacaagccggcctcggcaatcatctctctggaagtgagcggttgaccctcctggctcccctgaattctgtattcaaagatggaacccctccaattgatgcccatacaaggaatttgcttcggaaccacataattaaagaccagctggcctctaagtatctgt

SEQ ID NO: 258 - DNA, 387 bp, Homo sapiens
  misc_feature 90, 101, 279, 292: n = A,T,C or G
acggccagggctattggttgaatgagtaggctgatggtttcgataataactagtatggggataaggggtgtaggtgtgccttgtggtaanaagtgggctanggcatttttaatcttagagcgaaagcctataatcactgcgcccgctcataaggggatggccatggctaggtttatagatagttgggtggttggtgtaaatgagtgaggcaggagtccgaggaggttagttgtggcaataaaaatgattaaggatactagtataagagatcaggttcgncctttagtgttgngtatggctatcatttgttttgaggttagtttgattagtcattgttgggtggtaattagtcggttgttgatgagatatttggaggtggggatcaat

SEQ ID NO: 259 - DNA, 253 bp, Homo sapiens
acaagctccagaggagcaattgggtctttaaatatacacaagtatttccatcaaatgaattttcacccttacatccaaatagacctaagcggttaaaaacataagaaaaataagagctattagctatgtattaactgagaaaccacatacaaaccaaagaatatggaagagagaaagaagggctgaaaggccaaaggttgaaggggtagggagatgtaaaagagttgggaacaaagcccatcacacttgatgt

SEQ ID NO: 260 - DNA, 474 bp, Homo sapiens
acagagatcggatcacacaagcccggagacagcgcagcttctccattgactctggtcgcagacgcaaaggcagggaagcatccagcgtgtagtgcctgaaacatgacacattactcctaccaatatgtgacctgtctctcctgctctaggtcagttttctaagactcctggtctctgtatgaactttactgcactattccactggccagtagatagcctgtccccagtgctacttgacctcttggcgacttttacgtctttgccttgtaatccggcagttctccatccatttttaaagttgaagtcctcactttttcactgaacaaaagagcaaactctgaattggtatcggtatattatgctttagctgctcaaaaagaacctgtcctggaggaacctatactggcgaagagccaccaggttctccagtcagatctcacagtgagtttctccactcctttctacttcaacatt

SEQ ID NO: 261 - DNA, 446 bp, Homo sapiens
acaacgatctgggcatgggacagaatttaataaacagaagcatcttgaagctgctgataagggacattcaccagcacaaaagcctaaaactagcagtggaacaaaaccatcagttaaacctacaagcgctacaaagagtgattcaaatctaggaggacattctattcgttgtaaatcaaagaatcttgaagatgacactttgtcagaatgtaaacaggtgtctgataaagctgtttctctccagcgaaagcttcggaaagaacagtcattgcattatggttcggttcttcttataactgaattaccagaggatggttgcactgaagaagatgtgagaaaattatttcaaccatttgggaaagtgaatgatgtcctaattgttccatatagaaaagaggcttacctagaaatggaatttaaagaggcaattactgcaattatgaagt

SEQ ID NO: 262 - DNA, 278 bp, Homo sapiens
gtgaaaactacccctaaaagccaaaatgggaaaggaaaagactcatatcaacattgtcgtcattggacacgtagattcgggcaagtccaccactactggccatctgatctataaatgcggtggcatcgacaaaagaaccattgaaaaatttgagaaggaggctgctgagatgggaaagggctccttcaagtatgcctgggtcttggataaactgaaagctgagcgtgaacgtggtatcaccattgatatctccttgtggaaatttgagaccagcaagg

SEQ ID NO: 263 - DNA, 90 bp, Homo sapiens
taataaaaatacaaaaaattagccaggcgtggtggcatgcgcctgaggtgccagctactcgggtggatcatgagatcaggagatcgagac

SEQ ID NO: 264 - DNA, 448 bp, Homo sapiens
  misc_feature 299: n = A,T,C or G
actcaaggtttaaccttaaaattaagatttccttaaccttaaccttaaaattgatattatattaaacatacataatacaatgtaactccactgttctcctgaatattttttgctctaatctctctgccgaaagtcaaagtgatgggagaattggtatactggtatgactacgtcttaagtcagatttttatttatgagtctttgagactaaattcaatcaccaccaggtatcaaatcaacttttatgcagcaaatatatgattctagtgtctgacttttgttaaattcagtaatgcagnttttaaaaacctgtatctgacccactttgtaatttttgctccaatatccattctgtagacttttgaaaaaaaagtttttaatttgatgcccaatatattctgaccgttaaaaaattcttgtttcatatgggagaagggggagtaatgac

SEQ ID NO: 265 - DNA, 314 bp, Homo sapiens
acagtagggaacaaccatttttccgtgttcacaatttgtctttggcggatagtatcagcaccactgtgagtgacataggcagcatcttatggtgcaatttcaagggcagagggcaggtgtcccctgcaccacattccctccccacagctaccgcccctaccccagggacattctacacaaacacaccagcatttggcttaagggatccttgttggaatgcaaacggctccgattctgagtagaatttcagaagcctttttgagtcgttactcggggaaggggagaagatgagggatgggaagatctagtcctgt

SEQ ID NO: 266 - DNA, 319 bp, Homo sapiens
  misc_feature 116, 117, 131, 229, 236, 256: n = A,T,C or G
actaatgtatcaacttattctgcaggatagacctcctacataccaaccccaggattacagtttttcttctgtttaaaactaggatgttcagtagaaatggggtttctatttgcagnnttgttacaaaccantttcctctcacaaatagctaatatctaagaccatgactcaaactatcaaataggaatagaaagagaacacacagttttgaacgcaaatagaaaaggcntcctaanaatgttctttataggccacntgcttgctttcagtaaaaataacattttctcaaaacttttcaatctgatttttaatagcttgt

SEQ ID NO: 267 - DNA, 432 bp, Homo sapiens
acaggacagtaaaggaggcagttaatctgtaacaaacatcagtggttgggaggcaggaggtctggtctcttgatctttcctagtcatttacagaacaagaacagtgaggaaaagagttaatgtgttgtctaagaaggagaaatcaccaacgttcaagttgccagggcttaacttcctccttgacataataaatgtagagggtcttgaaatcctattttcttttacatgatcctatatatcaacttgaatagaactaatgtttacttttgaagaaaaatttaaattagaatggttgtcttaagtaaaggaggaagctttaaacatgatcctatatatcaacttgaatagaactaatgtttacttttgaagaaaaatttaaattagaatggttgtcttaagtaaaggaggaagctttaaaagtattctaatggt

SEQ ID NO: 268 - DNA, 214 bp, Homo sapiens
actaaaatgtattgtttggtgacaagaactgcaataaaaagataaatgattttctgaatgttgtggcaaagcagtctatttccactgcaatttctgctactattagcttaaaaattgctgagacaaaggacaaccttctgattatgctgctgagatctaatgcaaagtcctctcagagcttcactacacataaacattccagttataaaaatgt

SEQ ID NO: 269 - DNA, 365 bp, Homo sapiens
  misc_feature 11, 147, 169, 185, 265, 268, 270, 343: n = A,T,C or G
ctttaattgtnaagtaaaagctataaagcagtatttttcttgacaaatggcatatgttttccacttctttgcatgcgtttaagtcagtttatacacaaaatggattttattttttagtttaactgtgtttctccgacagctcacctntccctgaccagccagccatttncttcctgtgctccacnttcttctgtgtgattaaaataagaatattatttttggaaatatgcaactccttttcagagatcaggagggatttatgtancancntatttttactgcaaaagtaattcactggaaaaaaaatgtaatttgtaagaaagctttatttttatctcagctntatgtaaagttaaagttactgt

SEQ ID NO: 270 - DNA, 401 bp, Homo sapiens
actgcctcttactacaagatttgcttacccgggagttagatagcaagcatgggaaatgcctggcacacagaatatatggaattagtgttaggattttagtaacttcacagtcggaaagaggaaaataggaagagctgttcgtatagggtagactataggagagaatgcaaattttgaaagctacatcatcaaggattaaaattttgctgctagctttgtctctataataatgtggtcatctagtcttaatgcttattccttcaaaaagttcattcttttcatttttctccctttgtgcctaatgctcaatctcttgcactagtttcggaagtggtcttcttttatgtctgccctatatgctgttgttaaaactggtattgaaatgcacttttattcatggt

SEQ ID NO: 271 - DNA, 210 bp, Homo sapiens
  misc_feature 76: n = A,T,C or G
acttctattgggctggttccttcaccatttccaaaggggttctggagaccttgcaggaacaggaacagcaccttanccaagagggttccaggcctcctgcctaggcctgggctctcctcgttaggttcccaggaataaattgagttcccattggcagcacttgcaggtattgctagtccacggcaagatctgtcttagggattttctggt

SEQ ID NO: 272 - DNA, 468 bp, Homo sapiens
  misc_feature 432, 466: n = A,T,C or G
acatttacaaagatgcgttcaaatagtgctctaagagttttgttcagtggctcacttcggctaaaatgcagaaatgcatgctgtcagcgttggtatttcacattcaatggagctgaatgttcaggacctcttcccattgaagctataatttatttggaccaaggaagccctgaaatgaattcaacaattaatattcatcgcacttcttctgtggaaggactttgtgaaggaattggtgctggattagtggatgttgctatctgggttggcacttgttcagattacccaaaaggagatgcttctactggatggaattcagtttctcgcatcattattgaagaactaccaaaataaatgctttaattttcatttgctacctctttttttattatgccttggaatgggttcacttaaatgacattttaaataagntttatgtatacattctgaatgaaaagcaaagctnaa

SEQ ID NO: 273 - DNA, 446 bp, Homo sapiens
caggaattctgaattaagcacagagttgaagtttatacccgtttcacatgcttttcaagaatgtcgcaattactaagaagcagataatggtgttttttagaaacctaattgaagtatattcaaccaaatactttaatgtataaaataaatattatacaatatacttgtatagcagtttctgcttcacatttgattttttcaaatttaatatttatattagagatctatatatgtataaatatgtattttgtcaaatttgttacttaaatatatagagaccagttttctctggaagtttgtttaaatgacagaagcgtatatgaattcaagaaaatttaagctgcaaaaatgtatttgctataaaatgagaagtctcactgatagaggttctttattgctcatttttttaaaaaatggactcttgaaatctgttaaaataaaattgt

SEQ ID NO: 274 - DNA, 367 bp, Homo sapiens
ttttttttatcagtagcctatttcagatttattaaaaaacacataggtaacgagtcagagctttggctaggaatgatttggaaaagaactgaaggcataattccacaggacattcacagttgtgtgctagagacagagaggagcaggaaagtgttttagaagcatttgcggtggacaatggaaggcccggcttcatcgtattcctgtttgctgatccacatctgctggaaggtggacagagaggccaggatggagccaccgatccagacagagtatttgcgctccggaggggcaatgatcttgatcttcatggtgctgggtgctagggccgtgatctccttctgcattcggtcggcaatgccagggt

SEQ ID NO: 275 - DNA, 466 bp, Homo sapiens
  misc_feature 12, 13, 263, 451: n = A,T,C or G
actctgaggctnntaggagggtaaaatagagacccagtaaaattgtaataagcagtgcttgaattatttggtttcggttgttttctattagactatggtgagctcaggtgattgatactcctgatgcgagtaatacggatgtgtttaggagtgggacttctaggggatttagcggggtgatgcctgttgggggccagtgccctcctaattggggggtaggggctaggctggagtggtaaaaggctcagaaaaatcctgcgaanaaaaaaacttctgaggtaataaataggattatcccgtatcgaaggcctttttggacaggtggtgtgtggtggccttggtatgtgctttctcgtgttacatcgcgccatcattggtatatggttagtgtgttggttagtaggcctagtatgaggagcgtttatggagtggaagtgaaatcacatggctnggccggaggtcatta

SEQ ID NO: 276 - DNA, 242 bp, Homo sapiens
acctaagatcattttcctgaaagccaaaccaaacaacgaaaaacaagaacaactaattcagaatcaaatagagtttttgagcatttgactatttttagaatcataaaattagttactaagtattttgatcaaagcttataaaataacttacggagatttttgtaagtattgatacattataataggacttgcctattttcatttttaagaagaaaaacaccactcattttataaaatatagt

SEQ ID NO: 277 - DNA, 149 bp, Homo sapiens
  misc_feature 70, 71, 73: n = A,T,C or G
accattggtggccaattgatttgatggtaagggagggatcgttgacctcgtctgttatgtaaaggatgcnnanggatgggagggcgatgaggactaggatgatggcgggcaggatagttcagacggtttctatttcctgagcgtctgag

SEQ ID NO: 278 - DNA, 112 bp, Homo sapiens
  misc_feature 80: n = A,T,C or G
ataaaaatcaatcagtaggaatgtcattttaaaaagtaaaatagtgggacggttgtggtggctcatgcctgtaatcccancactttgggaggctgaggtgggtggatcattt

SEQ ID NO: 279 - DNA, 208 bp, Homo sapiens
actgtaattttattttaatgtattttgatttatgattatttattagttttttttaaatgcttgttctaagacatttctgaatgtagaccattttccaaaaaggaaactttattttcaaaaacctaatccgtagtaattcctaatcttggagaataaaaaagggcggtggaggggaaaacattaagaatttattcattatttctcgagt

SEQ ID NO: 280 - DNA, 172 bp, Homo sapiens
  misc_feature 13, 14, 73, 96, 97, 122: n = A,T,C or G
accattggtggcnnattgatttgatggtaagggagggatcgttgacctcgtctgttatgtaaaggatgcgtanggatgggagggcgatgaggactnngatgatggcgggcaggatagttcanacggtttctatttcctgagcgtctgagatgttagtattagttagttcctg

SEQ ID NO: 281 - DNA, 516 bp, Homo sapiens
accacgaagtcaatacttctcagtgagtagggaaagcaaaatacttcctcaatagcagggaaaaaaaagcaagagaaagactgaatttagaaaaaaaaagacaactgttaaagaaaatgtttaagtcaactttttttttttttttagacaaggatattgcaactatcacttaaagtctggtggcacattctttagtaggtccttaaggcaatatatttaaattaatttacaatttgatttgatgttaaagtttttttaaacatcacctcaaaatagatgctcaaaataatgccctcacaatagcctttgtaaaatgtattcagatgtttgataaaaaataatggtggctttatattacagtagtgctcattagcaccactataattaagggtctaccaagtttccagcaaaaccacctgtttcttaggagtttcaccataaaagatcacattggctttaaccagttgggtagcgcacaaaaaagcaatttttatcagttgctggtgctttttttgt

SEQ ID NO: 282 - DNA, 390 bp, Homo sapiens
acttagtcacctgcaaaaggagttaggaaaaacatttttaagactgcttgctggacaaaagactttcaagattccttacttgtggctaaaacattgctcaaaaaggataaacccacataagggccatggttgcctcttctttttcttattcagaaacaaaatcaccccccatacaccaaaaaacaaactgaaaaccaaaaacaacaacaaaaaaacaaaacccaaagccaaaggaatcccaatttgattcctatcaacccctcatgggaaagactaggagtctctgccatcgacctctagacaggacttccctggagtctgcaaaagcaagaacccgagagataagtgcctgtcacttacgtggccaattcagatgggttgcctaattat

SEQ ID NO: 283 - DNA, 198 bp, Homo sapiens
  misc_feature 105, 106: n = A,T,C or G
acagttggaatccatggcagttttatggaggccaaatatatcagatgaataggctaatttccctgagttgctggccttattagtccctactctgttgccccctgnntacctaatgcatgttcaaaaggtatagttttcatcacctgcttgatcttgattttcagacagcatcaaatcagttgcaaaacaaatccaagc

SEQ ID NO: 284 - DNA, 290 bp, Homo sapiens
acttattcgaatgatatacttgtgagctgttccatggtcataatcatccccaggagctgtccaagtcagattaatgagactgcccccgtgaatttccgccttcaggtcggtgatttggccaggtgggaagagatcaggtatgggagcatttgggacatcagaagccacaaatgagcctcccgaggatgttctgctgaaacacacttgcttgtgttgaacatcatccttattaatttcaggtcttggtggattccattgtatttcatcattctcaatccagccaggtatgt

SEQ ID NO: 285 - DNA, 551 bp, Homo sapiens
  misc_feature 518, 524: n = A,T,C or G
acaaagaagcagaagtgtaattttccttttcccagcatgacgaaaaattggagttctgccatttgagcagcttactggaaagatccagccttacttgtcttaaattgtccaacaaggtgactcattgcccggcaaacacttttaccctcagatgttactcatgatattataaaatatgaggccagtgctcaggtttgcatcataagtgagctatccctgaagggttttaattacttatttggcgtcctgattatatttgcaaacttctttataaaaggtgaaaaaagcacacaaaagagagggtgtcttcatattaaaccttcacaaccttcatgatttcataggattattttggaaatatagcacttgactttatgaaaggatctgggctaggtatattaggggtagttgccaataacctgaagaagctggcattgtttacagaaacagatcaagggctatgatttatgtcattttatagcagcagtatctattaatacatgccttttcctcccatncacctnccccgcacacacacaaaagatgacctg

SEQ ID NO: 286 - DNA, 409 bp, Homo sapiens
actaacaaaggaaaaaactatactgaagaagaagatcgttttctgatttgtatgcttcacaaacttggatttgacaaagaaaatgtttatgatgaattgcgacagtgtattcgcaactctcctcagttcagatttgactggtttcttaagtccagaactgcaatggagctccagaggagatgtaataccttaattactttgattgaaagagaaaacatggaactagaagaaaaggagaaggcagagaaaaagaaacgaggaccaaagccttcaacacagaaacgtaaaatggatggcgcacctgatggtcgaggaagaaaaaagaagctgaaactatgaatatgtttttgtttcataatcactaactttaaaccagtagttctttaatttacgggtcttcataagatgt

SEQ ID NO: 287 - DNA, 331 bp, Homo sapiens
  misc_feature 12, 292: n = A,T,C or G
acttatgtgttnatctaacagttcacttccatttttctagtctggattttttgagtatttaggaaagagagctattaaaaactctggggatttctcaatgtgactaactctaatttttctaattataactgcctttaattaacataatattaacttttgctgaggtttatgagattttctcaccccacatcgctcccctttttttaaaaaggactgttttgctagtgtgataatgaataggtaagatatgagataattgcaacattgtctagttctagtatggtaactattnttgaaatggtattgaaaaataccgttaattcaaattgac

SEQ ID NO: 288 - DNA, 509 bp, Homo sapiens
  misc_feature 11, 12: n = A,T,C or G
acctgtgggtnnattacctatgggtttatatcctcaaatacgacattctagtcaaagtcttggtaatataaccaatgttttcaaatgtattctgttatacaaagagcagatttttattgaacttgtgcaataactatattaccatacaatataaatattcatgaatagtttcccaagtctggagcgaccacatagggagaaaatgtaaatgtctcaatttttgttcacaaaagtatattttatcaaattgctgtaagctgtggatagcttaaaagaaaaaaagtttcctgaaatctgggaaacaagacatttaaagaatcagcaaaatttcaaataaaaaattatgaaaatattatcctcattagttcatttagtcccatgaaattaattattttctctgcttgatcttggtggacagtttcatgaagctgtcagttagttcattaaagttttggaaattctcaggacagtgcagtggtatcagaaacttgtattcaagagtacctcgg

SEQ ID NO: 289 - DNA, 257 bp, Homo sapiens
acccttccgctcacctatgcccatgtgcctgcccttccggcgggccaaggtgtttttccggcatcgagcccgggaatggaccgtcacaggcttgcggatgatcagcccatctttgatgagcttccggatctgctgacgggagttggcattggcgatttcattggtctcattggggtctaaccagaccttcttcttgccacagcggaggacactagaggcgagcctcttctgaagcctgagcatactcatggctgcgg

SEQ ID NO: 290 - DNA, 75 bp, Homo sapiens
  misc_feature 14, 25, 30: n = A,T,C or G
accttctcaaaccncatttcatgangcggnctgatcgaacatttgaccccttctctgaaactcctgttgatggtg

SEQ ID NO: 291 - DNA, 226 bp, Homo sapiens
  misc_feature 20, 57, 141, 184, 206: n = A,T,C or G
tttttttttttttttttttncgctctaaagatactttttatttaaatattttatgangatacatatacaaatataatcttccaaaaaacaaatgtaaaactaatacaaatcactttttcaggaacaaagaaaatcatttanaaaatgtgattatgctaaaagaggcaggttaggtttccaaggnctgctcaaggtggaagcttaanaccaacttttgtttgagtac

SEQ ID NO: 292 - DNA, 513 bp, Homo sapiens
  misc_feature 18: n = A,T,C or G
cttcttcagcacatgccnaagctgttcctcacggcctgtgagacaagagcatcttggatgtaggacaatggaagagttagatgccttattggaggaactggaacgctccacccttcaggacagtgatgaatattccaacccagctcctcttcccctggatcagcattctagaaaggagactaaccttgatgagacttcggagatcctttctattcaggataacacaagtcccttgccggcgcagctcgtgtatactaccaatatccaggagctcaatgtctacagtgaagcccaagagccaaaggaatcaccaccaccttctaaaacgtcagcagctgctcagttggatgagctcatggctcacctgactgagatgcaggccaaggttgcagtgagagcagatgctggcaagaagcacttaccagacaagcaggatcacaaggcctccctggactcaatgcttgggggtctggagcaggaattgcaggaccttggcattgccacagtgcccaa

SEQ ID NO: 293 - DNA, 524 bp, Homo sapiens
  misc_feature 63: n = A,T,C or G
acttacaaccacaatagcatactgtataatttagtggacttagttatttcaaaagatattatnccacttccctgctaaatgaaattaatcatcacctttgactttcaagaggtgaaaatagcgtgtaataaagcatatcttttagtcatcaggcctactgtgaaaagcaaatacagactgtatatattatatactagctgttattttttgcttcaattgtattttatctcttttgttaaaaaaacatgatttcatcttgtaactgaactgcacatataatatcagagaaaatcttctaatggcatgacttgtaaaatctctaccccaacaaattagtttgatatctaggagttaccttatctgaaacataatgagttatgttctacagtgtctgcaatcaaactttaaacaatcaggtccctctttcagtttagtatgttgttatactgaatacatgagtgttatggaaaagatttaggtctcataaatgggtgaagaaatttgtcatctacagaactaattca

SEQ ID NO: 294 - DNA, 430 bp, Homo sapiens
acaaaattctttctcttgaattagtgcacacagagttgcctgtgtgcagtgaggaatgaatccatagacaaggagtcgatcattgagaaacaaggacggcacctgggctggggcctgcagggcctcgggcacatctggattgagttgccgccatttgacggagacagagtggcaactcggagaacatagcctggtcatttggtcttctatctgttttctccaactatgcttggattttgcattaaaatattcaaatactccggcaccacactgggacaaaatccttaagacgtgacgatttgctgtagaaccgataccgcaggcgaataacctggtgtgcgggcggctcctcttcacgagctgtaatgtcaggctctcatcctggaggtgcccatcagacaccaggaggatgttccgtgaccctcgagca

SEQ ID NO: 295 - DNA, 213 bp, Homo sapiens
acatggtggtcaccactgagcccctcacccaggccgtggtagacaaaactctccttctggtggtgctgttactcggggtgacccttttcatcacagtcttggttttgtttgccctgcaggcctatgagagctacaagaagaaggactacacccaggtggactacttaatcaacgggatgtatgcggactcagaaatgtgaggggggcgggggc

SEQ ID NO: 296 - DNA, 140 bp, Homo sapiens
accacagtttaatagttttgtgatagttcaataactgtcatttgctttaatctacagaattttaaaaaatctaaataaaactattacgctggccagataaaatagtaacaaaaaaagtaaagagatataaaacaaactgt

SEQ ID NO: 297 - DNA, 130 bp, Homo sapiens
  misc_feature 8, 9, 11: n = A,T,C or G
accgcggnngntaaacatgtgtcactgggcaggcggtgcctctaatactggtgatgctagaggtgatgtttttggtaaacaggcggggtaagatttgccgagttccttttactttttttaacctttcctt

SEQ ID NO: 298 - DNA, 405 bp, Homo sapiens
acatttaaggcttttaaatgtggaaaaaaaaattaaaaccaaagaacccccaaatccaaacccctaaccaacacaagtagtatagcaatgttaagcatctcctatttctgatgcttatttggcgcaacttccagtgtcaaaacccaaataattcctaaactaaaaagattagtttagtgaaattttaattacataaattcttcaaagcataaacttggaatttttgtcttggaaatgttataaaatttttaatagcaaaacataggaataaaaacatattaacaaaatgtattcaatcatttacattacaaacaaggaatctgcagttcattgttgtagcctgacaaaagaaatcatatctaccattaagaatctatgcacaatgtgattgcaaatatgtacagt

SEQ ID NO: 299 - DNA, 554 bp, Homo sapiens
  misc_feature 403: n = A,T,C or G
accgtgggagcagggaaattggttttttaaaaagcaactgtttaattgcttaaataagctatgtattaaatctgtctccagttagggctatcttcctagcataggccccttaagtagcatgggggatatattttttgctataacgtaaaaattttcctttaaccactgccctctcctttctccttcaaggttctttccccctcagttttgttgttgtcttactctggagatgccaagtgtattttttctttctatgtaattttagattcgccttacaatgtaaatcttcacattggagataatattggttggaccttgcccatcttcactctagccttcgtatttgtgaaggactcagccaccttccttcttcaccccatgcttctcaccaaatttttgttgncattgagggcacttggataactcaagttgatatttatagctgatcaatctatatgtgtcacagaactatgctgcctaaagtgatcttggctccttaatggtccttttggccccttggatagttaacagctgagtaattctaatctcttctg

SEQ ID NO: 300 - DNA, 269 bp, Homo sapiens
  misc_feature 209, 215, 221, 226, 235, 238, 242, 246: n = A,T,C or G
acagcaaagcgacccttggtgtcatagatcagacggaaattctctcccgtcttgtcaatgctgatgacatccatgaatccagcagggtaggttatatcagttcggaccttgccatcgattttaatgaaccgctgcatgcaaatcttctttacttcatctcctgtcagggcatacttaagtctgttcctcaggaaaatgatgaggggganacactntctcancttgnggggaccgnctngatngacnaggagcaaacacaccggtcaatt

SEQ ID NO: 301 - DNA, 234 bp, Homo sapiens
accaacaacaatatgtggtgcttcagcctgcagtttttgcatttcatttcgaacatttgttccaccaatgcaggcatgacaagtggctcccatatagtctccaagtgccagaattaccttttggatctgttgagccagttctctggtgggggccaatactagtgcttgggtctccttgaactcaatctccaactgttgcaggatggaaatagcaaatgtggctgtcttgccagt

SEQ ID NO: 302 - DNA, 496 bp, Homo sapiens
accctcttcaagaatcggatggatgtcgttttgaagggcgacaatcttcctcagtatagaggggtgaacattcggagattgctcaacggtagcatcgtggtcaagaacgatgtcatcctggaggcagactacactttagagtatgaggaactgtttgaaaacctggcagagattgtaaaggccaagattatgaatgaaactagaacaactcttcttgatcctgattcctgcagaaaggccatactgtgctatagtgaagaggacactttcgtggattcatcggtgactccgggctttgacttccaggagcaatgcacccagaaggctgccgaaggatatacccagttctactatgtggatgtcttggatgggaagctggcctgtgtgaacaagtgcaccaaaggaacgaagtcgcaaatgaactgtaacctgggcacatgtcagctgcaacgcagtggcccccgctgcctgtgcccaaatacgaacacacactggt

SEQ ID NO: 303 - DNA, 453 bp, Homo sapiens
acccccagagacctcatagttgtccataagtgttttggaaggagcaggactcagccggaaggcattattaagtatccccagacctaatttctgcgccagagtagcccagtttttgtctggatcaggaatttctagtaacttatacagctgcagcttcacatcttcagccagctgtttcatgtctccttgtgctagtaaatcatcagatgtaaactctggctcatatggtttcccatttaatatgtcaaatacctgccagctggtggccatatctagaggcgtggttccaggcacaactccttcatcctctcctgcattttcccaagagtcatccaggtcatagagaggctcaaagttctccaccaggggatctgctcctgctgctttgagaagagctgccagcctggtggaccctctcccagctgctatatgcaggggtgtggttccatcgta

SEQ ID NO: 304 - DNA, 510 bp, Homo sapiens
acagtggttttcttttctttggtcggggagagtgggctggaatggagagtgaggcccacaaattacctgcagagacgtggaggcgtgagggagaacatgcttgttaaatatgcaggtagattaggagacaccaaacagagattcagacacagtaaggctgggatgagatcctcgaagctgtgttttaacaaactccactggagagtcccatattccctcaaatttgggaatcacgaccctgaaccaggttgggcctgaagcagtcaactgaattcactttttcggatagtaatttgttcccaggggcagtgacaaccatgatgttccaggtttggtctggcactctgccttgaacgtaggaagctcttgatgatttgtggaatgaatttttaaaaaattactatctggggaaaactagttggcatacagagttgtaggacagggtttatgtgattcatttgatattttagtattttgggtgtaaaagccaacaggcaaactttgccaggt

SEQ ID NO: 305 - DNA, 574 bp, Homo sapiens
  misc_feature 531, 551: n = A,T,C or G
accttttattcatgtgggaaatcaagtagtatcagaacttggtccaatagtccaatttgttaaagccaagggccattctcttagtgatgggctggaggaagtccaaaaagcagaaatgaaagcttacatggaattagtcaacaatatgctgttgactgcagagctgtatcttcagtggtgtgatgaagctacagtaggggaggcctactgaacttgacgcactggtatttggccatctatacaccattcttaccacacaattgacaaatgatgaactttctgagaaggtgaaaaactatagcaacctccttgctttctgtaggagaattgaacagcactattttgaagatcgtggtaaaggcaggctgtcatagagttatgtgttagtctcaggagtcttaacttttgaaatatgttttacttgaatgttacattagagattggtgtcagaattttaaaaccaaattactgctttttgaaacctcaaattatataatgtatcttatgtatgtgctttatattggtatttgngtatacattaaaataattcngaattatttaatctgatatgttg

SEQ ID NO: 306 - DNA, 540 bp, Homo sapiens
acatacttaaggcccagtggaattgtggaccacaaggctggaatgtggtgcggggaaaaatcacggtcataatgaaatgctagctcaagggctctgaactccaccatcaggcaatggtgagccactgtaggttttctgagatgggccatagtcagagctatgcttcgggaagatcacgatggcaataatgcatcacaaggatggagggggtgagaatagcttaaaggtaggaaaagcagttagaaggtcactggtaatagcagttgaggcttaattagtcagaatggaaaagaggatatggacatgagagatatcttagaggtgagaatgacagaactcggcaatcaccgcatttcataatgcatcaagtaggctgaccatatatcctggtttgcctgggatatgttttcctgatgtaattactaatggcacccttttactctcgaaaaggtttggacaataaactatataatcatattaattaggagcaattagtgaacagaatcaaaggtgactccaagattttaaacctggattagt

SEQ ID NO: 307 - DNA, 541 bp, Homo sapiens
acacaatggtttattaaaggaatgtatggcccacatcaacctagcaaggattctactggtaaaccttcccatggccaaaggaaaaacaagcaggagttgagtggctggggtggggtgcaggcaatggagagagggcagaagggtgtagaagctgaagggggctagaagcttactcctgagtttcttccttctgtcttcaaatctttacttcttatggccaaagacccagctgtttcataggctggagatgcactcttctagactgctcaagacagccagagacaggggaggagggaagaaggatactgtggaaagggatggcggggcaaacatttagagctagaagccactactgggccaatgctaaagtttctgtctctaagcctaaaaaagccagtgtagtagggcccttatcactcttagtttgctaggtttcccctctgaaataatgagcagatttagccaggctagcagaaaggaagaggacggggctgtgcaggagttagcagaatcttgattcttgctctatggtcggtacctc

SEQ ID NO: 308 - DNA, 566 bp, Homo sapiens
  misc_feature 507: n = A,T,C or G
acaacacagtgtcagggagtaggtgatttcttttccctatagttcatggtagtgatacctaaatgggtggcacaaaatgagttctggcttgttagactgatgcttctctttgctgcaggttttgaacaaactgtctggcttacaggggtgagggagagcacctgacaatgggtggtgatgtgcgtggagctcctaccctgaacatggcttcatgagatgtcctgtggtgggtcaatgctttatctcattccatggagccttcaagatgacaagaaaacatcaagagataggagcttgagataacaacattaaataacagaacatgtaacagggtaaaacactgagaagaaatgaaccaattcattgtttcctcccaagagagactgtgacactagttttaaaaagcggcaaagtcctttctctacatacatgcttggagatacccccaaacttagagattatgaagtaggccaggaaattcacttattgcacgatgcttggcagggnaacaaatgacgctgattttttcttttttaactgaactctctcaagaaaatgttttatga

SEQ ID NO: 309 - DNA, 319 bp, Homo sapiens
  misc_feature 14, 26, 31: n = A,T,C or G
accttcactatatnttactttattgntaatnaactgcatttttaaaagtagagattggtcttctcttatgtatacttatatccctctaaatttaaatccatcttgccatgttttgtatttaacttgaagtgatctaattaatgagaaaaagaggtattttaaaattaaggtgcatccaaaagggaagcgtaaggatacagagagatctggaaaccttgccttgagagacgtaatcgaaagaacctaggacacgtgccctgaaaatgagacaaggaagacatgtgagaaccatctgcatgtttgcaaagtctgtcgctgg

SEQ ID NO: 310 - DNA, 418 bp, Homo sapiens
acttgtttcaccatacttcattcagaccagtgaaagagtagtgcatttaattggagtatctaaagccagtggcagtgtatgctcatacttggacagttagggaagggtttgccaagttttaagagaagatgtgatttattttgaaatttgtttctgttttgtttttaaatcaaactgtaaaacttaaaactgaaaaattttattggtaggatttatatctaagtttggttagccttagtttctcagacttgttgtctattatctgtaggtggaagaaatttaggaagcgaaatattacagtagtgcattggtgggtctcaatccttaacatatttgcacaattttatagcacaaactttaaattcaagctgctttggacaactgacaatatgattttaaatttgaagatgggatgtgt

SEQ ID NO: 311 - DNA, 275 bp, Homo sapiens
  misc_feature 207: n = A,T,C or G
ctggcagctctgaaccctgagtccaacacagctgggctggacatatttgccaaattttctgcctacatcaagaattcaaacccagcactcaatgacaatctggagaagggactcctgaaagccctgaaggttttagacaattacttaacatcccccctcccagaagaagtggatgaaaccagtgctgaagatgaaggtgtctctcanaggaagtttttggatggcaacgagctcaccctggctgactgcaacctgttgccaaagttacacatagt

SEQ ID NO: 312 - DNA, 83 bp, Homo sapiens
  misc_feature 10, 13, 22, 23: n = A,T,C or G
acgcttctgnccncagccctanntccttcggcttcacatcaatgatgaccaatacggaattaggacagtatcttttcatgagt

SEQ ID NO: 313 - DNA, 413 bp, Homo sapiens
  misc_feature 171, 172: n = A,T,C or G
cacaagctcaggcatcgttgaagcatctacacgcgtccacagcagtactggctcaccacgcacaacactgtcccctgccagctccacaagccctggacttcagggagaatctaccgccttccagacccacccagcctcaactcacacgacgccttcacctcctagcaccgnnacagcccctgttgaagaatctacaacctaccaccgcagcccaggctcgactccaacaacacacttccctgcacagctccacaacttcgggccacagtgagaaatcaacaatattccacagcagcccagatgcaagtggaacaacaccctcatctgcccactccacaacctcaggtcgtggagaatctacaacctcacgcatcagtccaggctcaactgaaataacaacgttacctggcagt

SEQ ID NO: 314 - DNA, 357 bp, Homo sapiens
acacaatggtttattaaaggaatgtatggcccacatcaacctagcaaggattctactggtaaaccttcctatggccaaaggaaaaacaagcaggagttgagtggctggggtggggtgcaggcaatggagagagggcagaagggtgtagaagctgaaggggtctagaagcttactcctgagtttcttccttctgtcttcaaatctttacttcttatggccaaagacccagctgtttcataggctggagatgcactcttctagactgctcgagacagccagagacaggggaggagggaagaaggatactgtggaaagggatggcggggcaaacatttagagctagaagccactactggg

SEQ ID NO: 315 - DNA, 419 bp, Homo sapiens
accaggaagaaacatattgccgagtggatgccgccgcgcagcgtgtttgcttgaggcagaagcttcagcatctgctgggataactggaggaagaaatatgaagccttagcggctttacccgggaagcgagtttcgagatggcggctcagcggatccgagcggccaactccaatggcctccctcgctgcaagtcagaggggaccctgattgacctgagcgaagggttttcagagacgagctttaatgacatcaaagtgccttctcccagtgccttgctcgtagacaaccccacacctttcggaaatgcaaaggaagtgattgcgatcaaggactattgccccaccaacttcaccacactgaagttctccaagggcgaccatctctacgtcttggacacatctggcggtgagtggtggtac

SEQ ID NO: 316 - DNA, 99 bp, Homo sapiens
tctagtccagaatacaccaaaaaaatagaaaacctatgtgctatgggctttgataggaatgcagtaatagtggccttgtcttcaaaatcatgggatgta

SEQ ID NO: 317 - DNA, 473 bp, Homo sapiens
acttatttcaacaattcttagagatgctagctagtgttgaagctaaaaatagctttatttatgctgaattgtgatttttttatgccaaattttttttagttctaatcattgatgatagcttggaaataaataattatgccatggcatttgacagttcattattcctataagaattaaattgagtttagagagaatggtggtgttgagctgattattaacagttactgaaatcaaatatttatttgttacattattccatttgtattttaggtttccttttacattctttttatatgcattctgacattacatattttttaagactatggaaataatttaaagatttaagctctggtggatgattatctgctaagtaagtctgaaaatgtaatattttgataatactgtaatatacctgtcacacaaatgcttttctaatgttttaaccttgagtattgcagttgctgctttgt

SEQ ID NO: 318 - DNA, 505 bp, Homo sapiens
tttttttgaaaaagtcatggaggccatggggttggcttgaaaccagctttggggggttcgattccttccttttttgtctagattttatgtatacgggttcttcgaatgtgtggtagggtggggggcatccatatagtcactccaggtttatggagggttcttctactattaggacttttcgcttcgaagcgaaggcttctcaaatcatgaaaattattaatattactgctgttagagaaatgaatgagcctacagatgataggatatttcatgtggtgtatgcatcggggtagtccgagtaacgtcggggcattccggataggccgagaaagtgttgtgggaagaaagttagatttacgccgatgaatatgatagcgaaatggattttggcgtaggtttggtctagggtgtagcctgagaataggggaaatcagtgaatgaagcctcctatgatggcaaatacagctcctattgataggacatagtggaagtgagctacaacgta

SEQ ID NO: 319 - DNA, 547 bp, Homo sapiens
  misc_feature 234, 311, 488: n = A,T,C or G
ttttttttttttttggaggaaaacccggtaatgatgtcggggttgagggataggaggagaatgggggataggtgtatgaacatgagggtgttttctcgtgtgaatgagggttttatgttgttaatgtggtgggtgagtgagcctcattgtgttgtggtaaatatgtagagggagtatagggctgtgactagtatgttgagtcctgtaagtaggagagtgatatttgatcagganaatgtggttactagcacagagagttctcccagtaggttaatagtggggggtaaggcgaggttagcgaggcttgctanaagtcatcaaaaagctattagtgggagtagagtttgaagtccttgagagaggattatgatgcgactgtgagtgcgttcgtagtttgagtttgctaggcagaatagtaatgaggatgtaagtccgtgggcgattatgagaatgactgcgccggtgaagcttcagggggtttggatganaatggctgttactacgagggccatgtggctgattgaagagtatgcaatgagcgatttta

SEQ ID NO: 320 - DNA, 372 bp, Homo sapiens
acggccagggctattggttgaatgagtaggctgatggtttcgataataactagtatggggataaggggtgtaggtgtgccttgtggtaagaagtgggctagggcatttttaatcttagagcgaaagcctataatcactgcgcccgctcataaggggatggccatggctaggtttatagatagttgggtggttggtgtaaatgagtgaggcaggagtccgaggaggttagttgtggcaataaaaatgattaaggatactagtataagagatcaggttcgtcctttagtgttgtgtatggctatcatttgttttgaggttagtttgattagtcattgttgggtggtaattagtcggttgttgatgagatatttg

SEQ ID NO: 321 - DNA, 229 bp, Homo sapiens
gccgtggcaccggcatcggctgacactgctgcctccagctagttatttcgtcctcttccgttcttcacccctacaccttggaggtgaacttctcacctgagggctgtaaagactcgtttgaaaatggagagccaagaaccaacggaatcttctcagaatggcaaacagtatatcatttcagaggagttaatttcagaaggaaaatgggtcaagcttgaaaaaacaacgt

SEQ ID NO: 322 - DNA, 295 bp, Homo sapiens
accattggtggccaattgatttgatggtaagggagggatcgttgacctcgtctgttatgtaaaggatgcgtagggatgggagggcgatgaggactaggatgatggcgggcaggatagttcagacggtttctatttcctgagcgtctgagatgttagtattagttagttttgttgtgagtgttaggaaaagggcgtactactcgattgtcaacgtcaaggagtcgcaggtcgcctggttctaggaataatgggggaagtatgtaggagttgaagattagtccgccgtagtcggtgt

SEQ ID NO: 323 - DNA, 560 bp, Homo sapiens
accttgatcaggctgtgcatcacagtaattccgttctaggtaggcagagttgatctttgtctcatctgccaggctgcgggctcttcaagggcagggaccttgtcatagtcatttttattttcacagtgcttggaacatggtggaaaatgaatgttggaattattggagtaatataatttgtatcaaatgtccttttgaattaagagatttagttatgtttactaagaatgtaaactttgaattggtttgcattttaacaattaggatggtttattgatgtgaattttgaaatgtagaggtataatgttaaattattttatactttatggaaatcaagtgaaatgtttgaaaaaatgccgccattatcctctggtattttctactctctggaattatgtgctgtaaatgatcggctgtaaatgtgaggcacaccacccacccctgtgtggaaagtgttgtggcgcttcctgccacccacccacctctctaccgtcgctccttgtgacacttgtctgtcgtctcccatccaaactccaagcttacagctacctcagtacctc

SEQ ID NO: 324 - DNA, 602 bp, Homo sapiens
acaaatgatgaccaataattttatctttcttcctttgaatatactgtaaattctatgaaaaattcatttataaaaacaaagcaaagaatagcataaattttattttctttcgcaatgttatattttaatagaagaaaaaaactacctttctgataactgtaacctaagtaaaacaaatattttacatataatttgaggcaaagtaatgagtttcttgaatcaactggagaaattagtcacattacctatgtcatgcataaatgatggtaagaagaaaaaaaaagcatctgatcatgtatgagaactgtctccgttcaaattatgagaaataaaatgaaaattgctaaagggagaaaatgaataaaatatgatttaaaaaaaaccatatgggaattgcatagatgagaaaaaaattttcattctagggatctaaaagtaatgtttttagctttaaaaacatacacacacatatataattgagacatgtctatcatcttggctaaaattttaatatatgtctccccaaaagcattttaaatatgaaagccaagattcttaagctcttgatgatataccagaagggtatactttattattttttt

SEQ ID NO: 325 - DNA, 322 bp, Homo sapiens
  misc_feature 12, 13: n = A,T,C or G
acgatgtctagnnatgagtttgctaatacaatgccagtcaggccacctacggtgaaaagaaagatgaatcctagggctcagagcactgcagcagatcatttcatattgcttccgtggagtgtggcgagtcagctaaatactttgacgccggtggggatagcgatgattatggtagcggaggtgaaatatgctcgtgtgtctacgtctattcctactgtaaatatatggtgtgctcacacgataaaccctaggaagccaattgatatcatagctcagaccatacctatgtatccaaatggttctttttttccggagtagtaag

SEQ ID NO: 326 - DNA, 87 bp, Homo sapiens
acaattaagctattattgactatactcacccggttgtgctatcaaatactaggtcttatttatactttctaactacatagtttttgt

SEQ ID NO: 327 - DNA, 269 bp, Homo sapiens
accccctccccatctgcacaccctgtgttcaaaccagtcccagctcctgtcatgttattggcttctgagtatctgtattaatagttgttcctgccagcatatgaagatgaacaaatacacaactgagagagatccagggattttaatccacagatgccagagcttgctgggatgtagtcagaaatcaagctgaactcaggagttcacagtctttcctgtaatgatggttgggaggtgagggaagtcagaggccttttctaggatctttc

SEQ ID NO: 328 - DNA, 259 bp, Homo sapiens
acgtgggtgaggggatggaggaaggcgagttttcagaggcccgtgaagatatggctgcccttgagaaggattatgaggaggttggtgtggattctgttgaaggagagggtgaggaagaaggagaggaatactaattatccattccttttggccctgcagcatgtcatgctcccagaatttcagcttcagcttaactgacagatgttaaagctttctggttagattgttttcacttggtgatcatgtcttttccatgtgt

SEQ ID NO: 329 - DNA, 482 bp, Homo sapiens
ggaaaagattgatcgccgttctggtaaaaagctggaagatggccctaaattcttgaagtctggtgatgctgccattgttgatatggttcctggcaagcccatgtgtgttgagagcttctcagactatccacctttgggtcgctttgctgttcgtgatatgagacagacagttgcggtgggtgtcatcaaagcagtggacaagaaggctgctggagctggcaaggtcaccaagtctgcccagaaagctcagaaggctaaatgaatattatccctaatacctgccaccccactcttaatcagtggtggaagaacggtctcagaactgtttgtttcaattggccatttaagtttagtagtaaaagactggttaatgataacaatgcatcgtaaaaccttcagaaggaaaggagaatgttttgtggaccactttggttttcttttttgcgtgtggcagttttaagttattagtttttaaaatcagt

SEQ ID NO: 330 - DNA, 579 bp, Homo sapiens
acctgataaaactttaaccagggaagcattaaacacagtgcagcagcttttgcccaggcttctaagttcctgccggcagcatttatcaatgtaagaactaggatgcttcctgcagtggcactaccttcccctagagctggagcatgctgcttggccttaagccccagcatgatgaggcttccctcctgccaggtcagtaaaagttagagagctcagaattgggtcttgcctgggtgcaggtggcagggtttgctgaaacccctaaagagaagtcaccaagggaggcaggtaatgaatgtttccagaatcagtcggatactcatagcaatttctggctatctttcaaatgttgaatttctggatgctgagagggactttgatttgatatcattaaatccaggacagtcccaagaagtgcttggagtctcggctctgacagcccaagaagggaaataacttgtattaaggaacaactatgagccaggccctgagctgtctcttagataataaaacagatggggagtggaagagtcatttgcttcaagttatacagctaggaaatactcaagccaaatcttg

SEQ ID NO: 331 - DNA, 501 bp, Homo sapiens
acctgtgggtttattacctatgggtttatatcctcaaatacgacattctagtcaaagtcttggtaatataaccaatgttttcaaatgtattctgttatacaaagagcagatttttattgaacttgtgcaataactatattaccatacaatataaatattcatgaatagtttcccaagtctggagcgaccacatagggagaaaatgtaaatgtctcaatttttgttcacaaaagtatattttatcaaattgctgtaagctgtggatagcttaaaagaaaaaaagtttcctgaaatctgggaaacaagacatttaaagaatcagcaaaatttcaaataaaaaattatgaaaatattatcctcattagttcatttagtcccatgaaattaattattttctctgcttgatcttggtggacagtttcatgaagctgtcagttagttcattaaagttttggaaattctcagacagtgcagtggtatcagaaacttgtattcaagagt

SEQ ID NO: 332 - DNA, 503 bp, Homo sapiens
acctgtgggtttattacctatgggtttatatcctcaaatacgacattctagtcaaagtcttggtaatataaccaatgttttcaaatgtattctgttatacaaagagcagatttttattgaacttgtgcaataactatattaccatacaatataaatattcatgaatagtttcccaagtctggagcgaccacatagggagaaaatgtaaatgtctcaatttttgttcacaaaagtatattttatcaaattgctgtaagctgtggatagcttaaaagaaaaaaaagtttcctgaaatctgggaaacaagacatttaaagaatcagcaaaatttcaaataaaaaattatgaaaatattatcctcattagttcatttagtcccatgaaattaattattttctctgcttgatcttggtggacagtttcatgaagctgtcagttagttcattaaagttttgggaaattctcagacagtgcagtggtatcagaaacttgtattcaagagt

SEQ ID NO: 333 - DNA, 195 bp, Homo sapiens; identical to SEQ ID NO: 8

SEQ ID NO: 334 - DNA, 390 bp, Homo sapiens
actgcgactgtgggctgcggtcattcacgagacaggctcgtgttgttgggggcacggatgcggatgagggcgagtggccctggcaggtaagcctgcatgctctgggccagggccacatctgcggtgcttccctcatctctcccaactggctggtctctgccgcacactgctacatcgatgacagaggattcaggtaccattggtggccaattgatttgatggtaagggagggatcgttgacctcgtctgttatgtaaaggatgcgtagggatgggagggcgatgaggactaggatgatggcgggcaggatagttcagacggtttctatttcctgagcgtctgagatgttagtattagttagttttgttgtgagtgttaggaaaagggcgt

SEQ ID NO: 335 - DNA, 60 bp, Homo sapiens
  misc_feature 10, 13: n = A,T,C or G
gtacaagctnttntttttttttttttttttttttatttttttttttttttttggttaaaa

SEQ ID NO: 336 - DNA, 649 bp, Homo sapiens
  misc_feature 619, 632: n = A,T,C or G
actggtcgaaaacggccatcaaagaagaaaagtccaatgtatggattaacatgtaaaaatgtggcaacatcgaggtagttaggtaaagttgcagacagtccaagaatccttatcatactctgtgtggattccacctgccgtaaagtaccaccatttgaaaaaaaaaaaaaatcagtggatttccataacacagaaaatgcatggacatgcatctacagtagagttaaaaatttcctgtgactaaaaaattaaaaactgaatcaccagtagcaaatgtatagtcaatggctatgacaagaacagatcctgccgagctcataaatgcaattattgtcttttttgctttataaaaaagacattacatattttattgcattattctcctaataaaaacatactaccacgtagctctccccatccccattctttgcttccagatttttatagaaaataactgttttagtctggccttggaaagtgaacccaccagcaccaccttcacctactcactcttcaattcaatatgcacatagcaaaagccaacacttcaaatctcttgcccacatcaaaaaaagtagtttcaggagaaaaaacattaataccagttgataaaaataanggcataaaagctntgagagagatagctctg

SEQ ID NO: 337 - DNA, 411 bp, Homo sapiens
acggccagggctattggttgaatgagtaggctgatggtttcgataataactagtatggggataaggggtgtaggtgtgccttgtggtaagaagtgggctagggcatttttaatcttagagcgaaagcctataatcactgcgcccgctcataaggggatggccatggctaggtttatagatagttgggtggttggtgtaaatgagtgaggcaggagtccgaggaggttagttgtggcaataaaaatgattaaggatactagtataagagatcaggttcgtcctttagtgttgtgtatggctatcatttgttttgaggttagtttgattagtcattgttgggtggtaattagtcggttgttgatgagatatttggaggtggggatcaatagagggggaaatagaatgatcagt

SEQ ID NO: 338 - DNA, 278 bp, Homo sapiens
  misc_feature 14: n = A,T,C or G
tttttttgctctanagggggtgctatagggtaaatacgggccctatttcaaagatttttaggggaattaattctaggacgatgggcatgaaactgtggtttgctccacagatttcagagcattgaccgtagtatacccccggtcgtgtagcggtgaaagtggtttggtttagacgtccgggaattgcatctgtttttaagcctaatgtggggacagctcatgagtgcaagacgtcttgtgatgtaattattatacgaatgggggcttcaatcgggagt

SEQ ID NO: 339 - DNA, 446 bp, Homo sapiens
acttaaactccagaaagaaaaagctaggaaacagaagtagagaggaatggaaaaaaacaaaaaaacccaatacctctgccatcttgccccatcataacccaaatagcatcaaagtggcagagatgggactaaagttaaagcaagcatcaaagttattacttttagggtaatgggatgaatttgaagagcactatgtcaaccaaatactaaacttcatggaataactgtgtttgtgtttctgtggaggagttgcggttttgtttgttttaatttggcccacgctgccccaatggaggaaattttaagataatcattaataaggcaacagcttccaggattaaaatacctataccatctatacggagttacaatgaggacaagacccacatagaccacaaaggaaaccgggaccagaagcttccagtgcattttcacagatcgttggt

SEQ ID NO: 340 - DNA, 323 bp, Homo sapiens
accttcataaggtggtatggggggttggggtcaggccctgaacatcgtcctacttgagaatctgtcaggggaaaaagtcaaggggagcaggaggaagagccaggagggccagaggcagagaagagatggagtcttaggggccagggtgagcgaggggtccagggcctagaggtgcttcctgggggcgggggaatgcagccagtgtccccctcccctcttccaccccagctccagccctggtcttgtcttttcatccctcttccccacgacagaagaagttgtggccctggccatgtcatcgtgttcctgtgtcccctccatgt

SEQ ID NO: 341 - DNA, 501 bp, Homo sapiens
acctgtgggtttattacctatgggtttatatcctcaaatacgacattctagtcaaagtcttggtaatataaccaatgttttcaaatgtattctgtcatacaaagagcagatttttattgaacttgtgcaataactatattaccatacaatataaatattcatgaatagtttcccaagtctggagcgaccacatagggagaaaatgtaaatgtctcaatttttgttcacaaaagtatattttatcaaattgctgtaagctgtggatagcttaaaagaaaaaaagtttcctgaaatctgggaaacaagacatttaaagaatcagcaaaatttcaaataaaaaattatgaaaatattatcctcattagttcatttagtcccatgaaattaattattttctctgcttgatcttggtggacagtttcatgaagctgtcagttagttcattaaagttttggaaattctcagacagtgcagtggtatcagaaacttgtattcaagagt

SEQ ID NO: 342 - DNA, 338 bp, Homo sapiens
aggtactaaagggagaaagaaaaggaagagatcaccctcagtgcttctttgctgctccttttctttagacatttaaccccttttagttcagaaaatgtaaactagcactagcatggtcttttaaggattttgttcatatcagtcatatatctgttattattatgtatttaaagattgtgtttattcccacgatttggagaagcctagccaaaaaaaaaaaaaaaaaagattgtgtttatattattgctagaagatatgtgttgatgggaccaaaaaaagactggttaataaataaaaattttttctacactaattatatataaaccatattcacatgt

SEQ ID NO: 343 - DNA, 529 bp, Homo sapiens
gtgaatttgtccgtctccgacttctggagatttatttttttagatgaggtgttgctgtgttgcccaagctggacttgaacccctaggctcaagcaatccttccacctcagtctcccaagtagcagggactacagagtgatgatgcgggtgcgctggttggtgagacaggacagccggcaccagcgaatcagacttccacatttggaagcagttgtgattgggcgtggcccagagaccaagatcactgataagaaatgttctcgacagcaagttgaaagcagagtgtaacaagggatatgtcaaggtaaagcagagtttgaggaagaggcaaagaaccctggcctggaaacacacgggaagagaaagagatcaggcaacagtgattctatagaaagggatgctgctcaggaagctgaggctgggacagggctggaacctgggagcaactctggccaatgctctgtgcccctaaagaagggaaaagatgcacctatcaaaaaggaatccctgggccactggagtcaaggct

SEQ ID NO: 344 - DNA, 340 bp, Homo sapiens
  misc_feature 10, 11: n = A,T,C or G
actgagattnnccatggcattcataactgtcttcctaaaaacaaagcaatggctcaccaacgagccagccttcatgcttacatgtgacactgtaagtggaagtttagaaggatgtcctgacattaaaaagtagcctatcatcagattccagagctgaacagctgtgtttttctgtcagattttgattgttttggccttgcttgggaaaacctgcaggagtattgtatttttggcattgtagagcatttgagtagttggttcctttaaaaaggctttgaatactgtcctaaaaactcatccctaccactcacaagaaccaaagttttacctggctaatagt

SEQ ID NO: 345 - DNA, 291 bp, Homo sapiens
  misc_feature 27, 130, 167, 185: n = A,T,C or G
ttttttttttttttttttttgctctanagggggtgctatagggtaaatacgggccctatttcaaagatttttaggggaattaattctaggacgatgggcatgaaactgtggtttgctccacagatttcanagcattgaccgtagtatacccccggtcgtgtagcggngaaagtggtttggtttanacgtccgggaattgcatctgtttttaagcctaatgtggggacagctcatgagtgcaagacgtcttgtgatgtaattattatacgaatgggggcttcaatcgggagt

SEQ ID NO: 346 - DNA, 411 bp, Homo sapiens
acggccagggctattggttgaatgagtaggctgatggtttcgataataactagtatggggataaggggtgtaggtgtgccttgtggtaagaagtgggctagggcatttttaatcttagagcgaaagcctataatcactgcgcccgctcataaggggatggccatggctaggtttatagatagttgggtggttgatgtaaatgagtgaggcaggagtccgaggaggttagttgtggcaataaaaatgattaaggatactagtataagagatcaggttcgtcctttagtgttgtgtatggttatcatttgttttgaggttagtttgattagtcattgttgggtggtgattagtcggttgttgatgagatatttggaggtggggatcaatagagggggaaatagaatgatcagt

SEQ ID NO: 347 - DNA, 375 bp, Homo sapiens
acctaatcttcaagcttaaaatttaagttaaaattaatctctattttgtgggcaccctttagtgaactaaaatctacatgaaaccttttggcttttgtgtagcaggaaatacccacgttttgggtcaattagtgcagatgggagcagcagaggagctacaccagacagcaaagcaagactagagcaaacgagaaggaccagcccctagcccctctgtgctcccgggaggacctgggctgttttcacctaattacacccaactttgcttaaaagtcgtataatcagacactattctcagcacaagtttgataaatatacaaaaaccaggttcaatttcatcgtgagtttctttccattctgatccttgtatccaat

SEQ ID NO: 348 - DNA, 378 bp, Homo sapiens
gaagaaggcaggggcccttagagtcttggttgccaaacagatttgcagatcaaggagaacccaggagtttcaaagaagcgctagtaaggtctctgagatccttgcactagctacatcctcagggtaggaggaagatggcttccagaagcatgcggctgctcctattgctgagctgcctggccaaaacaggagtcctgggtgatatcatcatgagacccagctgtgctcctggatggttttaccacaagtccaattgctatggttacttcaggaagctgaggaactggtctgatgccgagctcgagtgtcagtcttacggaaacggagcccacctggcatctatcctgagtttaaaggaagccagcaccatagcagagt

SEQ ID NO: 349 - DNA, 429 bp, Homo sapiens
accaaaccactccaccaagagccagaacaacgagcagaagggtgacactaatggcaaccaaaacagaggccagcatctcaacattctttatggggatctgcatgcccagcatcttcacattgccttcttcaatgtctctggggggcactgctttttcagtctctttggtgatgacggtgagagggcttaagtgttctgttcgagaaaaaacagtgaagagggtctccatgccagcatggacatggtcagtcacatggcagtgcatcagccatgtcccagggttgctggccaccatctccacaacctcaaaagtccctgggaacagatccaccacatctgcccggtagttctcgccattccgatagaggaagctctctgcatgaaagtggatggtgtgtagatccacatcttggcccatggccagcatgt

SEQ ID NO: 350 - DNA, 339 bp, Homo sapiens
actgccaggggacagtgttgtgtctgtggagcctgggctgctgtgggaagctgtagattcctgactgacgcctggcatggtggtgctggcaggtaacagtgttgtatccgttgagcctgggctgctgctgtagacggtggtagattcctcactgaggcctggcgtggtggtgctggcaggtgacactgttgagtgagtagaacctggttggctacgggaggtggtggattcttcaccgacgcctaggcttgtcatactggcaggtgagagtgttgtggttggtgatctggggctgctgtagaaggtggtagatgcctcactgaggcctggtgttgtggt

SEQ ID NO: 351 - DNA, 594 bp, Homo sapiens
actagacgagtattgcgcccgaaatggagtccgggggtgtcaccgacatctctgctacctcagagacttgcttgaacgggcagaaaatggcgccatgatcgaccccacccttcttcactacagctttgccttctgtgcatcccatgtccatgggaacaggcctgatggaattggaactgtgactgttgaagaaaaggaacgttttgaagaaatcaaagagaggctccgagttctgctagaaaatcagattacacattttaggtattgctttccatttggtcgacctgaaggtgctttgaaagctactctctcactcttggaaagggttttgatgaaagatattgttaccccagtgccacaagaggaggtaaaaacagttatccgtaaatgtctggaacaggctgcgttagtcaactattctcggctctcagagtatgccaaaatcgaagaaaatgtaggccggttaatcactcctgccaaaaagcttgaagatacaatacgtcttgctgaactagtcattgaagttcttcagcaaaatgaggagcaccacgcagaggcctttgcgtggtggtcagatttaatggtggagcatgc

SEQ ID NO: 352 - DNA, 590 bp, Homo sapiens
acatcagaactcatgccaacagtctttatgatgggattaaggtggacaagatctcctaagatctgtgaatgggattaaggtggacaagatctcctaagatctgaaaagaaaccttaatacgctcatatggttggagtgttaagtgaacctctgattttgtcagggtttttctacgtgtaggcgtgaatagggggcaccccttcaaaactgtacattaaaaatatgttatatacgtaaatgctaagggcatcagttttgtatttttttttatttaacattttcatttcattggaaatttgaggtaattttgctaagtcttaaaggctaattcactacagttcttcccatttaagtttattacaaaaggaaatttagaataatttgaactctttattggataattgagatattgataactaacctcctataggaagtttgtatttttaaaatttatgaaataaagagaaatatttaaatacttgcgaagccatagctttaagtaattaggatgtttttactttgacacctattcttagtaatgtaacaacaaatattttaagttagcaactaatacaggtacgtacagcatt

SEQ ID NO: 353 - DNA, 196 bp, Homo sapiens
acatatttttacagtaaaatgctttatggaactagttttagagccctctatggctttaaggccttgcttactgcctgcaaattttgagaaatttaaaaataagcattctaacacttttattcccacagaaaaattccaagtcaaattatcaaatcaaacacaaaaataagtcttacctcttgtataagcatgttgt

SEQ ID NO: 354 - DNA, 143 bp, Homo sapiens
acctttgtgcagtagaagctagtgagcatgtgagcaagcggtgtgcacacggagactcattactatctgccaagagtagaaagaaaggctggggatatttgggttggcttggttttgattttttgcttgtttgtttgttttgt

SEQ ID NO: 355 - DNA, 447 bp, Homo sapiens
acattcattggaacaacatagccaatttattaatctattctagaatattaatagctttcatacattctccacaaacagaccaatcactgccacacaattcatctttagaaagtttttaagcatcatgatttgtagcttactgtcattgaaaacaaaacaaataattctttatttataccaaacaaatctttgatgggcacttagtttcctttatggcaatactagatttctagttatcaaaaatattaaagtaattataaagtttaaaaccctgcaacatttacagaaaccaacagtattaccactttcacttttaagctaaattagataatgtttgcatgaaatagctttcattttttcctacctggagatgtcttgtttttaaattattaaattgtcaaactaaaaatactcctcccttttcagaagctagtgaatagagagggt

SEQ ID NO: 356 - DNA, 195 bp, Homo sapiens; identical to SEQ ID NO: 8

SEQ ID NO: 357 - DNA, 106 bp, Homo sapiens
acaggactaggaagcagataaggaaaatgattatgagggcgtgatcatgaaaggtgataagctcttctatgataggggaagtagcgtcttgtagacctacttgcgc

SEQ ID NO: 358 - DNA, 165 bp, Homo sapiens
cgactttccaacatttttgttattggcaagggcaacaaaccatggatttctcttccccgaggaaagggtatccgcctcaccattgctgaagagagagacaaaagactggcggccaaacagagcagtgggtgaaatgggtccctgggtgacatgtcagatctttgt

SEQ ID NO: 359 - DNA, 557 bp, Homo sapiens
  misc_feature 505, 510, 512, 523: n = A,T,C or G
acaatacagtgttcaatagtttttattgcagtgatgtttttccaataatttaagtaattctcttcctagtataatacagttttcataaataatgtttacttgctttctttatattttcaaataaaattaaaatgctcgagcacttcctttcagaaagttataaaattaaaaataattattttaaatgctcattcaaatgtgtctgtatacttgctatgcccctttttctataattccaaactgagactgatttttcagagatttttaactttaataattttaaatctagaatcaagtgaaacagatatgttaaatactgagtctagttttcttccatcttatggagcttcatggaataagaaactaatctagtgcaaatgaagattaaatatttctgggtgatggagagatagtcaacaaatttatttatccatcctctgcacatcagtccactggagcaggagttctacacattaaaaatgtaatgggatcagcctagcattgnttggngntcttttgttgnattttttttagaatgggggtgggggcctaagtgt

SEQ ID NO: 360 - DNA, 213 bp, Homo sapiens
  misc_feature 15, 173, 180, 181: n = A,T,C or G
actacagtctggctnacacgagtgagacctcatctcaaaaaataaaaaaaagtaaaaaataattttaaaagagtgatttaaaaagtaagcatactgatacaggttcccagtcccttacccacagttctaaaatcccaaatctctgaaagccaaaacctttttcattattttgngggaaannaattatagcatcaaaacctgaatttatgtggt

SEQ ID NO: 361 - DNA, 391 bp, Homo sapiens
  misc_feature 11, 14, 36, 230, 238, 253, 346: n = A,T,C or G
agcgtggtcgnggngcgaggtaccctaccttcaccnccctctttgtaagttggtgacttgcatctgtggccttgaatattttattatcacatgtggcataacagtatccacactttttagttctttattttttttttttattttgagcaattctcctgcctcagcctcccaaatagctgggattacaggtgcatgccaccacacccagctaatttttgtatttttagtanagacaggntttcaccatgtttanccaggctggtctcaaactcctgacctcagatgatccgcctgccttggcctccccaaagtgctgggattacaggtgtgggagccaccaatgccntgacccacacacttttttacttgtatagatgatttttggccttgg

SEQ ID NO: 362 - DNA, 366 bp, Homo sapiens
actcactggaggtctgagaaccttaaaatgctgtcgctacattttttttcccttccaattcagaaagcaaagtgttaccatagtaacaggactatgttaaagatgtctattttgcatagcacataaaaagtaggtttcctgtttactcttcttgtttcccagaagggagggggtgcgggggaggacaggaggagggagccacagctaaatcgtcacctgaagcccccagtgtgacctgctggattctagagaacacttcagcccataaggcaagggaaaacccaacgcagaaataaacgccggaacatcttgtcattgttaaatatatgatgcagtcacatcggcttcctgctctgtggggctcgt

SEQ ID NO: 363 - DNA, 320 bp, Homo sapiens
acttggggtggcgggtcaggctgcggagctcgtggatgccgtgtgtgaactggcacttgtccccgtactctgaggcttgtaggagggtaaaatagagacccagtaaaattgtaataagcagtgcttgaattatttggtttcggttgttttctattagactatggtgagctcaggtgattgatactcctgatgcgagtaatacggatgtgtttaggagtgggacttctaggggatttagcggggtgatgcctgttgggggccagtgccctcctaattggggggtaggggctaggctggagtggtaaaaggctcagaaaaat

SEQ ID NO: 364 - DNA, 492 bp, Homo sapiens
actcaagcaccatactgtagtttgttttaaacagctggaagtcaccaattgttcaaaaacagtgtgtattacataatcaatttcaaaagattatgtaaagaataaatgaggatatttgtaaggtgcttagtgtgcttatgtatgtgtgctaaatgtgctatgccttacacatagaggacacaattttaatgtggataattggtattcaaattattactcttaaatcacattctcttttctcaaagcaaaaagaataaagaaaaacgcaatacattctagtcattgaacatttatagacatttaaacccaaggggaacactagaggtcatttggttcaagttccttgttttactggtgagaaaactgaagaccagagaggccaagtgacaggtccacagtctcatagggagtaagggagtaatggacaaagattagaaaccgcagctctcaactctttgactagtgtcttgtagaggaagcctttcatgctgt

SEQ ID NO: 365 - DNA, 175 bp, Homo sapiens
ccgccttctaggccgtaacggaattcctgaaggttggagactccatagaagtggacaaaggctgctgccaccaccaggacatggaaaatctgatgagactggaaccatatgtcaaattttccaggaaagaagcgctcaggaattcgagcagcataaaggccagctccagtgatgt

SEQ ID NO: 366 - DNA, 279 bp, Homo sapiens
ttttttttgctctagagggggtgctatagggtaaatacgggccctatttcaaagatttttaggggaattaattctaggacgatgggcatgaaactgtggtttgctccacagatttcagagcattgaccgtagtatacccccggtcgtgtagcggtgaaagtggtttggtttagacgtccgggaattgcatctgtttttaagcctaatgtggggacagctcatgagtgcaagacgtcttgtgatgtaattattatacgaatgggggcttcaatcgggagt

SEQ ID NO: 367 - DNA, 393 bp, Homo sapiens
  misc_feature 8, 30, 31, 33, 323: n = A,T,C or G
agcgtggncgcggcgaggtactctgctatnncnctggcttcctttaaactcaggatagatgccaggtgggctccgtttccgtaagactgacactcgagctcggcatcagaccagttcctcagcttcctgaagtaaccatagcaattggacttgtggtaaaaccatccaggagcacagctgggtctcatgatgatatcacccaggactcctgttttggccaggcagctcagcaataggagcagccgcatgcttctggaagccatcttcctcctaccctgaggatgtggctagtgcaaggatctcagagaccttactagcgcttntttgaaactcctgggttctccttgatctgcaaatctgttcggcaaaccaagactctaagggcccctgcca

SEQ ID NO: 368 - DNA, 396 bp, Homo sapiens
acctttgatgtgcctaatagtttcagatgtcttagttttttataaccatagttgattaggccaagaggcattcatttcttatttaagctggcaaaattagcaggaattagagaagtttaaaaagataaatggttttatgataatgttaaccatcttttgttagtaaatatgcgttctattattttaatcattgatgccttacaaaagaaaacatcttttctaataccctgaatatgtgctgttcttagaatcatctatggattcttttaaaggttgtttgtgaaattagttttccctttttagaatctcaggagtagtggggtaaagacatttcctgctgtcagtggataagacagagcttgttaactgttttggcagtagttaaaatcaaattgt

SEQ ID NO: 369 - DNA, 297 bp, Homo sapiens
ctcagagcccctccctgctaccaaggcccagctatggccccagggttgaaaagttatgagggtcagggcagtatctctctgcctatttattggggtgcctatttattggggatctgcattccccgctgcccaatcatttgcaatgccctaattagggcatcctgcccctcgccttttaggctcaggacggaaggtcagttgccatggttaccgaggaccctggttactctggtgctgtcctgttttactggaccccgcctcccagccccaggggtgcctgtgggggtccatttgggt

SEQ ID NO: 370 - DNA, 435 bp, Homo sapiens
  misc_feature 14, 15, 17: n = A,T,C or G
acatttgatgtggnnanatgactctaagaaatgctgaagtattggcattacatgtgtttactagtatgataatgttgattcaatctgaacaaaagataatataaaaataacccttcagagtttggacatttcaagttggtaataataaaaaataatatttaagaagatatatatatatatatatttagttttttccacttcattttacatgccactatattgactttaattgatatacagtattaagtttttaggtgccattatttttaaaaaattctatatttccaatgaacgatgttagattttacacagaacatattctctgcatgatttcagaaaagaaaatctaaaaaggtaatacgggtatttcaaataaaatcctttctggtatgaaaggctccattgattttattaagccttcctttaccttgtagt

SEQ ID NO: 371 - DNA, 506 bp, Homo sapiens
  misc_feature 19, 477, 498: n = A,T,C or G
caggtacaggtggtcttcnagggatagcacgaggtggtctgacaggactaacacttaccagcctctatgcactatataataactgggagcacatgaaaggctccttgctccaacagtcactctgaagattttgccaactcatgaatggaggacacttcagtagtcatctagatccttttataagacagtttggagttattctctctcttctacctacaattagtttgaaaaattggagattttgatttgctgtgatgaaaatcctggatggctgaccaagactggcacttgttccagccattagtgagttgaagccaaagccctttggtgactcactgagtactcgcccaactcccggccactccccgacatcttgtagccaccaaagggtgactgggctccaaacacatcatagcagttgacccacacagtgcccgcctggagggcctgggacaggtaattggccttgtccaaatnctttgtgaagacagctgcggncagcccgt

SEQ ID NO: 372 - DNA, 343 bp, Homo sapiens
caggagtctatattctgatcggagccggcgccctcatgatgctggtgggcttcctgggctgctgcggggctgtgcaggagtcccagtgcatgctgggactgttcttcggcttcctcttggtgatattcgccattgaaatagctgcggccatctggggatattcccacaaggatgaggtgattaaggaagtccaggagttttacaaggacacctacaacaagctgaaaaccaaggatgagccccagcgggaaacgctgaaagccatccactatgcgttgaactgctgtggtttggctgggggcgtggaacagtttatctcagacatctgccccaagaaggacgt

SEQ ID NO: 373 - DNA, 496 bp, Homo sapiens
  misc_feature 13, 17, 263, 419, 426, 457, 465, 483: n = A,T,C or G
actattgacccancgangggggcttcgacatgggctttagggagtcataagtggagtccgtaaagaggtatctttactataaaagctattgtgtaagctagtcatattaagttgttggctcaggagtttgatagttcttgggcagtgagagtgagtagtagaatgtttagtgagcctagggtgttgtgagtgtaaattagtgcgatgagtaggggaagggagcctactagggtgtagaataggaagtatgtgcctgcgttcangcgttctggttggctgcctcatcgggtgatgatagccaaggtagggataagtgtggtttcgaagaagatataaaatatgattagttctgtggctgtgaatgttataattaaggagatttgtagggagattagtatagagaggtagagtttttttcntgatagngttcactggataagtggcgttggcttgccantgattgtnaggggtaggagtcaggtngttagtattagga

SEQ ID NO: 374 - DNA, 515 bp, Homo sapiens
actggataaaagtaaacttcaaaccttagggcgggagcactaaaaccaaaatacatgtattatttatagaaaatattttctgttttaatcttttctttttaaacaaggactcatacttaaaaaaatgtttagcaaaaaaaaaaaaaaagttgagaacttttaatttattttaaggactgcaaatgccagtgtaatttttttaatttgcagtttctgtaaacaacttgtataatagaaaagcagagaaataaatttccctccccttcaagatgcacctcatgtttgttttaaggtatagcatttagtccagatttgagaaagtttggggtgaacaaggtaagaaagatttttttttttggcatcaaatctttctgcctgcctctcagcttgcttcagaaaatttaaaaaatcacaatagtaatcaaaacatacataacattgaaacagaaggaaatgctgtggaccacagaactccaagaattgtttaaaaaaaaaagtgctaccctgagaaaagt

SEQ ID NO: 375 - DNA, 196 bp, Homo sapiens
  misc_feature 17, 31: n = A,T,C or G
accattggtggccaatngatttgatggtaanggagggatcgttgacctcgtctgttatgtaaaggatgcgtagggatgggagggcgatgaggactaggatgatggcgggcaggatagttcagacggtttctatttcctgagcgtctgagatgttagtattagttagttttgttgtgagtgttaggaaaagggcgta

SEQ ID NO: 376 - DNA, 340 bp, Homo sapiens
  misc_feature 13, 207, 209, 261, 326, 329: n = A,T,C or G
acgtgtggcttgntcacttcgtggctaaggtaagaacgtgcttgtggaagacaagtctgtggcttggtgagtctgtgtggccagcagcctctgatctgtgcagggtattaacgtgtcagggctgagtgttctgggatttctctagaggctggcaagaaccagttgttttgtcttgcgggtctgtcagggttggaaagtccaagccgnangacccagtttcctttcttagctgatgtctttggccagaacaccgtgggctgntacttgctttgagttggaagcggtttgcatttacgcctgtaaatgtattcattcttaatttatgnaangttttttttgt

SEQ ID NO: 377 - DNA, 387 bp, Homo sapiens
acatcaccgacggctaccgggcctacctgccgtccaggctgtgtatcaaaagtttgtttattttatctaatgagacagtaaacatctggagtcatttgctgggtttctttctcttcttcaccctgggaatatatgacatgacatctgtgttaccttcagcaagtgcgtccagagaagattttgtaatttgttctatttgtcttttctgcttccaggtctgtatgctttgctctgtgggctatcatcttttttcctgccatcggtcagaaaaaacatgtcgaagatggatggcattagattatgcaggaatttctattggaatactgggctgctatgtctcaggagtattttacgcattttattgtaataactactggcgtcaggtgt

SEQ ID NO: 378 - DNA, 369 bp, Homo sapiens
acttctggaaaaaaatgcaaatggtttagccaggatctttcctgtctgattcgtcactattattatatctgatgatgcgaatggttggagcgattcaatcctaagtcattaatgagctattttataaacaccactgtctgaagatcttcatttacattttgctaaggatcacttcgctaacctcacaggcttgtgtcaacagcatgatttgcaggacttcagttacactcttataaacaacacggctgtattgttaatcggttaatattttataaagtgtaaatattttattatgttttgaagggaactattgattctaaattattaaacccctgagaaggactatttaaatgaaatatacaattaagt

SEQ ID NO: 379 - DNA, 193 bp, Homo sapiens
accattggtggccaattgatttgatggtaagggagggatcgttgacctcgtgttgtgtaaaggatgcgtagggatgggagggcgatgaggactaggatgatggcgggcaggatagttcagacggtttctatttcctgagcgtctgagatgttagtattagttagttttgttgtgagtgttaggaaaagggcgt

SEQ ID NO: 380 - DNA, 216 bp, Homo sapiens
  misc_feature 35, 36, 121, 126, 128, 147, 148, 150, 172, 178: n = A,T,C or G
ctcccccgtggtgtaggccacgtggtgaccctcannacgctggatcaccacacggtgcttgtcttccaacttcagctccgtcctccccatgaagatcttgatggccttggagcaggtgacncccgnantgccacaggggacgttctnngngatgatgctgaatgagcccagngagganttctggccgcagtagtcctgaacagccacgtaggagca

SEQ ID NO: 381 - DNA, 353 bp, Homo sapiens
gtttgaccagtcacagattcaggagttcaaagaggccttcaacatgattgatcagaacagagatggcttcatcgacaaggaagatttgcatgatatgcttgcttctctagggaagaatcccactgatgcataccttgatgccatgatgaatgaggccccagggcccatcaatttcaccatgttcctgaccatgtttggtgagaagttaaatggcacagatcctgaagatgtcatcagaaacgcctttgcttgctttgatgaagaagcaacaggcaccattcaggaagattacctaagagagctgctgacaaccatgggggatcggtttacagatgaggaagtggatgagctgt

SEQ ID NO: 382 - DNA, 340 bp, Homo sapiens
ggacttttttagacagatcttcatggcctgttcccaccccagttcatcatcatctcttttacaccaaaaggtctgcagggtgtggtaactgtttcttttgtgccattttggggtggagaaggtggatgtgatgaagccaataattcaggacttattccttcttgtgttgtgtttttttttggcccttgcaccagagtatgaaatagcttccaggagctccagctataagcttggaagtgtctgtgtgattgtaatcacatggtgacaacactcagaatctaaattggacttctgttgtattctcaccactcaatttgttttttagcagtttaatgggtac

SEQ ID NO: 383 - DNA, 195 bp, Homo sapiens; identical to SEQ ID NO: 8

SEQ ID NO: 384 - DNA, 270 bp, Homo sapiens
  misc_feature 200, 201, 217, 218, 243, 261: n = A,T,C or G
actcccgattgaagcccccattcgtataataattacatcacaagacgtcttgcactcatgagctgtccccacattaggcttaaaaacagatgcaattcccggacgtctaaaccaaaccactttcaccgccacacgaccgggggtatactacggtcaatgctcagaaatctgtggagcaaaccacagtttcatgcccatcnncctagaattaattccnntaaaaatctttgaaatagggcccgnatttaccctatagcactncctctagag

SEQ ID NO: 385 - DNA, 358 bp, Homo sapiens
  misc_feature 10: n = A,T,C or G
atggccccanccatagcatgggaggaaacttatagaaccattggcctatattgggttggatctattattatgagtgttgttgtttttgtgccaggaaacattgtagggaagtatggaacacgaatttgccctgcttttttcttaagcataccatatacttgtcttcctgtctgggctggtttcagaatctataatcagccatcagaaaattataattacccctcaaaggttattcaagaagcccaagcgaaagacctgctgagaagaccatttgatttaatgttggttgtgtgtctcctcctggcaactggattttgcctgttcagaggtttgatttgctttggattgcccatctgag

SEQ ID NO: 386 - DNA, 251 bp, Homo sapiens
  misc_feature 170, 202, 227, 234: n = A,T,C or G
tccagcaaaaccagaaatacgaatatatttttctgggctttcacatttgttgatttttattcgcgatctttttcaatacaatttacaccctcatccccatttccagtctgattatacaagtgctaagtggcagaaaggtctggaataaatacatcaaaaagaagaggcanagctgtgaaactaagttgcatgcaacaggttntatgagggtgggggaagtgtctganaagtaanagagagtaagacaatgt

SEQ ID NO: 387 - DNA, 313 bp, Homo sapiens
  misc_feature 13: n = A,T,C or G
ggagacggcctgngtgctggcgaagcggaggccggagttaatacacgaggaactcatgcaaaggaggggactttcggaaatccaaacttagagtgccttgtatttagaatccggaaggaaaaggaaatgaaatgtgaagaaactcatgcaccaaactcgaactggtaagaagactgttagaatgccctcggtaacacagaggctgagagatcctgacataaatccttgtttgtcggaatctgatgcttccaccagatgtctggatgaaaataactatgacagggaaaggtgttccacttacttcttgaggtac

SEQ ID NO: 388 - DNA, 580 bp, Homo sapiens
  misc_feature 546, 560: n = A,T,C or G
actccatctctttgactgaataggtcattgatcctatcaagggataacaatgtttttgccactggatgttgatgttcctatccaaatccacagcaagctggtgttgcaattttccagattcatgcagatccactgacttcagtgctgataacaaataggcaatcccaaaataaaaggaggatatagttaccaagattgagtagatataaagatagaagagatttgattggtataattaaataagctaatcatgtctaatttattataggtttagatgaggggatgtttttgaaaattatttgaacagtcaaaagtgttacgtagcatcttggattaagatggtggataggaggcaggactagcttgcagctctcactcagacaaacagagcagcctgtggagactcacatcatgaacttctgctccaagaactgccacaggaacataccaggaaagtcagaagaatccatagaccctttgaaggaacaggatcaccactgcaggctctctgagatgctgaaaaactgtgtccctagggcaagtttncatcctgcctgtangacagcagctgatgtgctct

SEQ ID NO: 389 - DNA, 379 bp, Homo sapiens
gaagaaggcaggcgcccttagagtcttggttgccaaacagatttgcagatcaaggagaacccaggagtttcaaagaagcgctagtaaggtctctgagatccttgcactagctacatcctcagggtaggaggaagatggcttccagaagcatgcggctgctcctattgctgagctgcctggccaaaacaggagtcctgggtgatatcatcacgagacccagctgtgctcctggatggttttaccacaagtccaattgctatggttacttcaggaagctgaggaactggtctgatgccgagctcgagtgtcagtcttacggaaacggagtccacctggcaatctatcctgagtttaaaggaagccagcaccatagcagagt

SEQ ID NO: 390 - DNA, 435 bp, Homo sapiens
ttgtaaacctaactatggtaatattttaaaaggtaaattatggtaaattattagctcataagaagaaaaaatctttcaactctaacgttaaggctgactgaattaaagtgtgctagagtgttctatattagtttgagaataattttataagatgaacgaggagagaacttattactgaactattaactttcaaaataatctgcattttcctttttccctaagtgttcatgctattctgtctgctaatacttcaggttaaaaccttcatcctttggtgtccatttttgtaaccttggaccattttaatgttttttctactggtaaactagatcatatattccaggtcatttggatttttattttacttgtcacatatatctagttttactagatttagaagacagcagtctgctttaatccttttgtatctaccgt

SEQ ID NO: 391 - DNA, 283 bp, Homo sapiens
  misc_feature 177: n = A,T,C or G
ttttttttttttgctctagagggggtgctatagggtaaatacgggccctatttcaaagatttttaggggaattaattctaggacgatgggcatgaaactgtggtttgctccacagatttcagagcattgaccgtagtatacccccggtcgtgtagcggtgaaagtggtttggtttanacgtccgggaattgcatctgtttttaagcctaatgtggggacagctcatgagtgcaagacgtcttgtgatgtaattattatacgaatgggggcttcaatcgggagt

SEQ ID NO: 392 - DNA, 441 bp, Homo sapiens
cttttctccaatacctgccaatacagaaaactattatcagttgttattgttatcccttgaaagcgagggtgacaaaaacaacaaaacaccgttataaacacatcaaaggttcattctgactgaggtaagactttccaagcccttgttagattaggccttataaaacttgtgtgcattataacctaagctgtgcaacctgtgaagccaagagtgaactgatgtttcatttatattttcatccaaatgacattatctgcacgtttttaaaatttaaaaacaaaggactatttaaaaatacagtttattaacaaacgtgaactactttctgttacattaggtgttccctagtgtttcttaatttctttttagaaagtgtatttttattagtatttttccggtgaacagaagatttgtttggatttaaacatttactaagacagt

SEQ ID NO: 393 - DNA, 481 bp, Homo sapiens
  misc_feature 16, 17, 18, 387, 409, 420, 448, 472: n = A,T,C or G
atttaaagcaatatcnnnagggcacccaattattgaatgagaaaattttcaattctggccatgagaaagaaaaaaaaataaacagccttctttttttttcctttgttttaaaactgtggttttttaaaaaagcaataattaactcagacctcactaaaaatcatttttgtttttatattgttatgtcataagctctattatgttattctaacaagtagcaatttcacaaaatttgtatgtagatgttaacgcacatttcctttgcttcttttattagactagtgttgactttggggggggacatttattcacaaatgagaagtaggcacaaagtaaaaaatggaaccatctactaacaaggatcctttaaaactgccaagggagctntaacttgaaggccacatcctanagatgggcagnccaaatagcacatgggcaaatttggcancatctttttatatggttgagtctnctgaatatt

SEQ ID NO: 394 - DNA, 460 bp, Homo sapiens
caggagttcaagactagcctgggcaacatgccgaaaccctgtctctaaaaaaaaaaaaaaaatttggccgggtatggtggcagtaggatcgctcaagcccaggaggtggaggttgcagtgagccaagatcacgtcactgcactccaggaagggcaacagagcaagactccttctaaaaaaaaaaaaaaaagaaagaaagaaaagaaaattaactttggtatttcaggttgtatttaaatggagacttaacatgaactatgttcataacacttgaccaaattaagtgtagatcgtctctttaataaagagatcatctggaactgcaatttctaactcatacatcattgctacaaaccttatttgtttactatttctcttccaaggaccatcagtcatcctttaaaattcatttcaagctctgaaaagatattttttgttacatgggcaatttacttttagt

SEQ ID NO: 395 - DNA, 573 bp, Homo sapiens
ttctttattttcaatatttgtcttattaatatttttcttattttataatgcaattacaacaatttaggagacaaaacaatataaacaaaagaatgttaaatagttttttttaaaaaatagcttgttgcttgcaagaaagtccatataatcttattcccccccaaatataattttatactttgcactaaaccaaaatagcttatggaaaattagtattaaatagctaaacacagaaaacctacagctataaataacataaaatacagtttaactttaatgtgatgcttaaacaaagcaaactatgatgcaatatgaatcaacttcattaattggacaagtccagtgaggcacaaattagataagcactaaaccctccatgatgtgcaagtgaaacctccaaccccagcaaggttctttctgttcttgggctatgtccaattccattccagaaaagccacagtttttacatgttcttgacttttttactgaggagacgcacaatatatttcacccaagtctgttttggatttgcgcacacagacaactttttctttgtgtgaaagatgatagcat

SEQ ID NO: 396 - DNA, 460 bp, Homo sapiens
acagctaaaggacaactcccgaaggtcaaatgaatacacacagtccgtgagtcagaaatctggagggctgtgtggacggagacattgctcccgctgttttgctgctgtgaaatgctcagtgaaacctaattgaatttgacaattataaattacatattgaaaccgtatagttcacctaaggaatagcaatgaaaacagtgaagacaccagaagccagagttcaggaaatgtcatattcacatagaaatactttaaatttttctcaaagctttattttctcttttttcaagaaaagctccagaccacccagttgcactggtggaagtccttttgggaagctgtactcttccatgactggcttttattctacattatatttgtgagattcatcagtatagttgtgtgtatttgtagatcttttattctcatttctgcatatattttattatgtgaatgtacc

SEQ ID NO: 397 - DNA, 61 bp, Homo sapiens
  misc_feature 42, 48: n = A,T,C or G
ggcttatcaatgccccattccacccaagcacacaagagctcnttatcnctaacatcactat

SEQ ID NO: 398 - DNA, 337 bp, Homo sapiens
actggaccagccaatcaataccacagacctgcctttccacattgactggaatgatgatcttcctctcaacattgaggtccccaaaatcagcctccacagcctcattctcgacttttcagcagtgtcctttcttgatgtttcttcagtgaggggccttaaatcgattttgcaagaatttatcaggatcaaggtagatgtgtatatcgttggaactgatgatgacttcattgagaagcttaaccggtatgaattttttgatggtgaagtgaaaagctcaatatttttcttaacaatccatgatgctgttttgcatattttgatgaagaaagattacagt

SEQ ID NO: 399 - DNA, 476 bp, Homo sapiens
  misc_feature 14, 425: n = A,T,C or G
acatttttttaggnctcttaaactttaatttcacacagtaaattttgaatctcataaggaagcatatttgaacctagtcaatttaatcttagtgttcccttgaaaactttttttccctacaaaattttaagtgaaaaatacaatagtaaattaagattacactggggaaaaaaatgcaggtatcactttactccattgttatctgacctagagcttaattaagttttagaaatatgtaataccttccatcattccatcatccttaaattctgttaccaaataatggctaatgttacaaaaagttatactccagagacccaaagcttgacatttacctaatgtatgagaaaatattaccaattaacaataaagaatgatcatatttttaacctcttttacatagcctaataactcaggcaaggccncaacgtctgtgctaaatttaaactgccaaatattgactgcagcaaacaaga

SEQ ID NO: 400 - DNA, 195 bp, Homo sapiens; identical to SEQ ID NO: 8

SEQ ID NO: 401 - DNA, 501 bp, Homo sapiens
gcaagtttgctgagctgaaggaaaagattgatcgccgttctggtaaaaagctggaagatggccctaaattcttgaagtctggtgatgctgccattgttgatatggttcctggcaagcccatgtgtgttgagagcttctcagactatccacctttgggtcgctttgctgttcgtgatatgagacagacagttgcggtgggtgtcatcaaagcagtggacaagaaggctgctggagctggcaaggtcaccaagtctgcccagaaagctcagaaggctaaatgaatattatccctaatacctgccaccccactcttaatcagtggtggaagaacggtctcagaactgtttgtttcaattggccatttaagtttagtagtaaaagactggttaatgataacaatgcatcgtaaaaccttcagaaggaaaggagaatgttttgtggaccactttggttttcttttttgcgtgtggcagttttaagttattagtttttaaaatcagt

SEQ ID NO: 402 - DNA, 579 bp, Homo sapiens
  misc_feature 16, 18, 27, 297, 320, 323, 436, 443, 462, 478, 532, 547, 559: n = A,T,C or G
gtgcggaggtgctccncncagagttgnttctcgagcagcggcagttctcactacagcgccaggacgagtccggttcgtgttcgtccgcggagatctctctcatctcgctcggctgcgggaaatcgggctgaagcgactgagtccgcgatggagaaaactttagaaactgttcctttggagaggaaaaagagagaaaaggaacagttccgtaagctctttattggtggcttaagctttgaaaccacagaagaaagtttgaggaactactacgaacaatggggaaagcttacagactgngtggttaatgagggatcctgcangcnaaatatcaagaggatttggttttgtaactttttcatccatggctgaggttgatgctgccatggctgcaagacctcattcaatttgatgggagagttagtttgagccaaaacgntgctgtngcaagagaggaaatctggnaaaaccagggggcttnatgtaactgttgaagaaagctgtttgttggcggaaatttaaagaaagatactgnggaacatcaccttanagattactttgnggaatatggaaaaaattgat

SEQ ID NO: 403 - DNA, 373 bp, Homo sapiens
acaatctcggctcactgcaacctccacctcccaggttcaagagattctcctgcctcagtctcccgagcagctaggaccacagatgtgcatcaccatgcctggctaatttttgtattttttagtagagatggggtttcaccatgttggtcaggctggtctcgaactcctgacctcaagtgacccgcccttgtcggcctcccaaagtgctgggattacaggcatgagccactgtgcccagcctatatagtgtgaagcttttaggaaaatcagagcagggtagacagctgttaaaaacaatgtttaaatggaataatgttgaatgtttacaggctgtaagaactattgtatacacaaaataatacacaaagtttgt

SEQ ID NO: 404 - DNA, 414 bp, Homo sapiens
accgtgaggccctagcagacgaggccgacagggccagagccaaggccagagctgaagccagtatgagggccagggccagtgctagggccggcatccacctctggtgagggttggtgaaaagttggccagtgggtccccgtgaggacgaactactgtcctgagtcataagtaatatgggtggggcgagggtcttatttctgtagaaatcgtgtgactttaaggatttagattttgtatcttatgttttgtaacatttaataattactgttaaaatgctgtttgtaaatgagattggtctactttttcctgtaggattttattgtagagttttgctggttttgtaaaatggatggaagaactttgtatttatactgtgattttgaacagattatgcaacattggaaggaaggctgt

SEQ ID NO: 405 - DNA, 293 bp, Homo sapiens
  misc_feature 9, 10, 11: n = A,T,C or G
aggaagcgnnnaaacaccatatcacagattgtctgtcagtaatctgctgttcagccaagagagttcaaagggagcagtttctgcatgtagggaagttggaagacacaaaccccacctcccctgggagcttgtaacaaagcagacagggatgcaaaaataaatgatgtcagcctgcagccaaactccagcatcccacaccgcagctgacccactgctcatcgcgagggcctgccaggagctggcctcccgcactacttgtgagtaaagtgaatatcaaataccaatcttagagt

SEQ ID NO: 406 - DNA, 201 bp, Homo sapiens
acattaaaatacagtgttattgacctaacacttgacccaacataaatattattaataaaatgggaatattaatattaaccaggcacactgttatccctgcccataagtttgatggcgccattcagacttgcggcaactctggatcccctgaggtaactctctcatattccttctttggttctttactttttcgatttctgt

SEQ ID NO: 407 - DNA, 496 bp, Homo sapiens
actattacctgaatgcttctattccttttttgatcttcgaaaagaattcaagaaatgttgccctggttcacctgatattgacaaactggacgttgccacaatgacagagtattaaattttgagaagagtagttcagtctctcgatatggagcctctcaagttgaagatatggggaatataattttagcaatgatttcagagccttataatcacaggttttcagatccagagagagtgaattacaagtttgaaagtggaacttgcagcaagatggaacttattgatgataacaccgtagtcagggcacgaggtttaccatggcagtcttcagatcaagatattgcaagattcttcaaaggactcaatattgccaagggaggtgcagcactttgtctgaatgctcagggtcgaaggaacggagaagctctggttaggtttgtaagtgaggagcaccgagacctagcactacagaggcacaaacatcacatggggaccc

SEQ ID NO: 408 - DNA, 510 bp, Homo sapiens
ctcaaaacaaatgataaccatacacaacactaaaggacgaacctgatctcttatactagtatccttaatcatttttattgccacaactaacctcctcggactcctgcctcactcatttacaccaaccacccaactatctataaacctagccatggccatccccttatgagcgggcgcagtgattataggctttcgctctaagattaaaaatgccctagcccacttcttaccacaaggcacacctacaccccttatccccatactagttattatcgaaaccatcagcctactcattcaaccaatagccctggccgtaccaagactgagaggccccctcccaggtgagctggatcttcaagaggtctcccaagtcctcctcggtgtagaccaggaaggtgttggtggcattctgctcgatccgctccactatttccagtggcagagtctgggaatctgcattagtgccataaagggtgacgtaaaaggtgggctcaatttctcccatgttct

SEQ ID NO: 409 - DNA, 462 bp, Homo sapiens
acctagaatttcatagtaaggcagactgtcaagaagagcatcaaagtgaagacattttctgtcaggcaaattttcagaaagtctcctttgcacccttactgaggaagtatcttgaggaaattctccagcaaaatgaggatgaaaaccaggaaagaagaagaaataggatccataaaacagtggaccttacttaggatgtctcattctagagtgacagccaaaagggtatctcaccctagagtgacagctatccagcagactaatttcagatgagagcatactgtctcgggctttctgggaagaatgtgcattcagtgccatagatagtatcattgaagagctgggatgcttgagaagattatttagtcaagaaaaaagaaagacaaatcaacaatatgtcaaaaaattcaggtccaattatagagcaaaataaaatgaggcatgattttgagttattcatga

SEQ ID NO: 410 - DNA, 215 bp, Homo sapiens
ccagcttgtgaaacgtgtcatcgaaggcagcctgtctcccaaagagagaactcttctcaaagaggaccctgcttactggtttttgtctgatgaaaatagtctggagtataaatattacaagctgaagttggcagaaatgcagcggatgagcgagaacttgcgaggagccgaccagaagccgacctcagcagactgtgcagtgagggccatgctgt

SEQ ID NO: 411 - DNA, 351 bp, Homo sapiens
acacctttaattgaaaaggtgagaaaagctccatactgtgatgctatgatttccccaaggcttaccttctataagtagtcactgataaagtgccattgacccgcatttgtttagaattatttcattaaaattggggtatgatctagcagtttataataaatatttatggataattttattggcttttaaaagatactgtaaaattgacatatctcaaaatggagttaatttatatttacaacaaaccaaacacaaacatcaattatggaattacagggtcacattttaattcctgaattttacagtttagcattaatatcaccacatgtatacaaatggtgtaaaacaagt

SEQ ID NO: 412 - DNA, 536 bp, Homo sapiens
acaaaggtaagtcccagctgctggaggggttgccacactggcgaggagatgtgagagatcgtggccatggaaggccctggcagccatccctggagccctcactccctcccactctgtgctttccccccctctcctccttctcctcctcctggccctcagcccagcatctcacaccctcagttttcaatccctggtaagattgctcaattctgttttgttgtgtggatttgagtttgattttggtagaagtgtagttgtgttttatgttcaggtgtctcttgatcacagtaacccatagtcccccactggggggacggtgggggaagactttgggaggattttacccagaatacttgccgcctgctttttgtcctccaggaaaccagaagcccgggtaattaggtaggccggggagcagcgttgagtcagatggaatgcaggagtgggaggcctgtgctgattagcccaagccctttgctgttacagaatgtccccaaaattgctatatgaaagcaacccttcgattcacatatgat

SEQ ID NO: 413 - DNA, 479 bp, Homo sapiens
acatttgaacacacggctgtgttaaagatgctgctaatgtcagtcactgggtgcactaaaggatctcttattttatgtaaaacgttgggattgacaagatagatctgacactctgttaagttaccctctgaagctacttcttgtgaaatactaatgacagcatcatcctgccaagcgaaagaggcaggcataagcaaggacaaattaaaagggggtaagagccttatcatgatgaggagtcttgttttgacatcttgggaaaagctgtccatagtgtgaagtcgtcaatttctcaccatggtttgcagtttgcctgtctctagttaggtgaagtctctgagtggcacacacctcaggcctgagggttttccctttaaattttcattgagttgtccatctccagcatatagggcttcaggagcagagcagaccttgtttttagtggttccatgggataaaatgggattggaggagctaga

SEQ ID NO: 414 - DNA, 383 bp, Homo sapiens
acctgcaatatatttggagtattatgtctttattgttgttaaaaagtttttattgaatgtatgaaaattatcaaattgtattcatcattattaacatgtcctggggaaggaagggaaactttctaggacagaagtcactttcagatgtcatgtatgtattgggtgttcaatcatatctaacactgttttgatttttgtgggaaaatattccaggaaacgctaattctctttagactccttgttcttttatgactacaatgaacatatgtctatgtgatagctaaagatatttttgaattgtatgtgtgcttaattatcggtaagtataaatatttgagaaaacacctggtctggatatttaaaaccctcataaacatgttggt

SEQ ID NO: 415 - DNA, 349 bp, Homo sapiens
  misc_feature 10, 11, 12, 51, 59, 168, 223, 261, 293, 302, 316, 326, 332: n = A,T,C or G
tttttttttnnntttttttttttttatttggtttcggttgttttctattanactatggngagctcaggtgattgatactcctgatgcgagtaatacggatgtgtttaggagtgggacttctaggggatttagcggggtgatgcctgttgggggccagtgccctcctanttggggggtaggggctaggctggagtggtaaaaggctcaaaaaaatcctgcgaanaaaaaaacttctgaggtaataaataggattatcccgtntcgaaggcctttttggacaggtggtgtgtggnggccttggnatgtgctttctcgngttacatcgngccatnattggtatatggttagt

SEQ ID NO: 416 - DNA, 305 bp, Homo sapiens
accattggtggccaattgatttgatggtaagggagggatcgttgacctcgtctgttatgtaaaggatgcgtagggatgggagggcgatgaggactaggatgatggcgggcaggatagttcagacggtttctatttcctgagcgtctgagatgttagtattagttagttttgttgtgagtgttaggaaaagggcatacaggactaggaagcagataaggaaaatgattatgagggcgtgatcatgaaaggtgataagctcttctatgataggggaagtagcgtcttgtagacctacttgcgctgca

SEQ ID NO: 417 - DNA, 129 bp, Homo sapiens
  misc_feature 11: n = A,T,C or G
acttgatgacncccacccctcatcattcaggaacagttaactaccaaatgaagcacactggagattgaccagtttgcaaattcactacttcacagctccaaactaaatgcaaaaccattctactaagta

SEQ ID NO: 418 - DNA, 530 bp, Homo sapiens
gatgtaaaagctcaaaaattgtgattccttgaacgttcactaaatcttcaagcaaaaacacatttttacattatttttacgttgattattttagtgaaagaccatatgaagaagcatttttaatattaacttgttacatactttgatccactttacatcatttttatgttgttgaggtagggaaattagggttcagtttatcactggacattcaggaggcaagtcaatcctttttatttccttataaaattaactcttcaaaagccgttaaacagagagttatcttaatttttattgcagtaggaggaaatatatttaaaatatttgtagatttatagcaaatagagactcgttatttaaaggttaaataacaatttgttcttttgttgtttttgccagtttagggcagtagctgcttttgtcataaatatcttcctaccacatcaaaaatgctgcttttaaaatttttgtttataaattgagaaggaattttctctctataagtttctgtcattgaacagatcaccatt

SEQ ID NO: 419 - DNA, 262 bp, Homo sapiens
actttctggtcttcatttaggaattataaattcatgacaaaagaacaaattttttatggaataaataacttccaggaacaacagtttataagtattcagttgtttaaataaacaaaactattttccttcctaaaatgtaaacatccagtaaatgaaacatacatgatattccaggtatagaaatcttagtaactcacttatgaaagaggtgcattttggtatgtttggtggtaaggtttttgtttatcttatgtataaaagt

SEQ ID NO: 420 - DNA, 410 bp, Homo sapiens
  misc_feature 14, 17: n = A,T,C or G
actgaaattagtanaanctaggccaatgatccatgaattgttaactgaagggcggagatcgaagactaacaaagcaaaaacccttgctacatgggcaacaaaagaactgaggaaactgaagaaccaagcttgatctgttaccattgggatgataacctgaggacccccactggaaatctcccatcttttgaaaaacctggaagtgaggagtgtgcacggatgctgaatgtttgggaatgagaggatgagtgagtgaggcttgaaaacacaccacattgaaaatcctgccacagcagcagccgcagccgccaacagcagcgctgttagtgagctaagtaagcactgacttcgtagaaaaccataacatcggccatcttggaaaagagaaaaacaatggagttacttatttt

SEQ ID NO: 421 - DNA, 235 bp, Homo sapiens
gttgtgctggttatttccagaaagaagggaatggcaaagtatgagaaggctgagataaaggagatgggtgagatgcatagggaactcaatgcataactatataatttgaagattatagaagaagggaaatagcaaatggacacaaattacaaatgtgtgtgcgtgggacgaagacatctttgaaggtcatgagtttgttagtttaacatcatatatttgtaatagtgaaacctgt

SEQ ID NO: 422 - DNA, 502 bp, Homo sapiens
acctgtgggtttattacctatgggtttatatcctcaaatacgacattctagtcaaagtcttggtaatataaccaatgttttcaaatgtattctgtcatacaaagagcagatttttattgaacttgtgcaataactatattaccatacaatataaatattcatgaatagtttcccaagtctggagcgaccacatagggagaaaatgtaaatgtctcaatttttgttcacaaaagtatattttatcaaattgctgtaagctgtggatagcttaaaagaaaaaaagtttcctgaaatctgagaaacaagacatttaaagaatcagcaaaatttcaaataaaaaattatgaaaatattatcctcattagttcatttagtcccatgaaattaattattttctctgcttgatcttggtggacagtttcatgaagctgtcagttagttcattaaagttttggaaattctcaggacagtgcagtggtatcagaaacttgtattcaagagt

SEQ ID NO: 423 - DNA, 508 bp, Homo sapiens
acctgtgggtttattacctatgggtttatatcctcaaatacgacattctagtcaaagtcttggtaatataaccaatgttttcaaatgtattctgtcatacaaagagcagatttttattgaacttgtgcaataactatattaccatacaatataaatattcatgaatagtttcccaagtctggagcgaccacatagggagaaaatgtaaatgtctcaatttttgttcacaaaagtatattttatcaaattgctgtaagctgtggatagcttaaaagaaaaaaagtttcctgaaatctgggaaacaagacatttaaagaatcagcaaaatttcaaataaaaaattatgaaaatattatcctcattagttcatttagtcccatgaaattaattattttctctgcttgatcttggtggacagtttcatgaagctgtcagttagttcattaaagtttttggaaatttctcagacagtgcagtggtatcagaaacttgtattcaagagtacctg

SEQ ID NO: 424 - DNA, 444 bp, Homo sapiens
actgcagggctgagtcgctgcggaagatgctgaatgactccaccagggatgaggggacgagactccccgtagggaggatctccactctcagggacacgctggtgaagagttgggttggagggttatagagagtgaagtgcacagacacagccctggtgctgcggtcaatccacatgctggccctgagtcgggacagggctgtgtgggcttcagtccttgttctgcccaggctgagcacacagtcctcccttgtcccacagcccccaggaccattcagggtcacgttttggttctctgggtctatcaggtaggggttctcagggcctccaacttcgggactacatgtaggaatagagtcttcgatgagtgctgaaaatggcctgggaggcttgcataaatgcctaggaaaaacttttagctgcctaattacggaactgcctatta

SEQ ID NO: 425 - DNA, 617 bp, Homo sapiens
  misc_feature 492, 495, 556, 559, 564, 597, 598: n = A,T,C or G
acttggttttacagctcctttgaaaactctgtgtttggaatatctctaaaaacatagaaaacactacagtggtttagaaattactaattttacttctaagtcattcataaaccttgtctatgaaatgacttcttaaatatttagttgatagactgctacaggtaatagggacttagcaagctcttttatatgctaaaggagcatctatcagattaagttagaacatttgctgtcagccacatattgagatgacactaggtgcaatagcagggatagattttgttggtgagtagtctcatgccttgagatctgtggtggtcttcaaaatggtggccagccagatcaaggatgtagtatctcatagttcccaggtgatatttttcttattagaaaaatattataactcatttgtttgtttgacacttatagattgaaatttcctaatttattctaaattttaagtggttctttggttccagtgctttatgttgntgntgtttttggatggtgttacatattatatgttctagaaacatgtaatcctaaatttaccctnttngaatntaatccctgaatgatattttttatcataaatgnngaataatcaaatacatttt

SEQ ID NO: 426 - DNA, 353 bp, Homo sapiens
  misc_feature 18, 19: n = A,T,C or G
acgctcaaattcataacnngccaaagctggtgataaaaggtaggagagctggtcttcccaaacagtagtgaggccaagatccttcctgtgttctgacaccaggagcctcagctgcatttcaatttcattacttgttactgacgcgtcaattgtggatgcacacagaggtggaaagggaggaagggatgttgtagctccaggagcacacacagatttaattgcttcctcactcatgggtttccatttggattcatcgttcaaatcaaatacacaggtttctactgcatcagagggttgacaatttcccaggaacatctgatggttgaaaacacaaccaattgttcgatatgggt

SEQ ID NO: 427 - DNA, 579 bp, Homo sapiens
acaacatgacttaaaacttttttttttctattaaaacttaaaggggaacaaaacttgaaaaagccctgttcttcagaaggtgagtgggttgagggaggcagtaatatgaagtgactgctgtgtattttaactaccagattttttatatttgccactgttaaatagttggaaaggggaaattctgattaagcgaaagtggtatcatcctaggtaagcttatttcagaacaagtctaatatttcagattctttcttttcgactttatactctgagttattacttactgtaagtggtgtatatgaaacctccatgcattttccagtatggatctgctaatatgcacagtaaatccatgtctttgtttgtttttctattaaaaagcaatcaagaaagataatgtgaaaaagaaaggaatttagaggtagggaaaagatgaatgtcagacatttgaagaactatagtaaaatgataaacactaaatatacttgagaaaactttcttaatatgccaatgaggtaggcctgatctttgaaatagtgaataggaatacaatgcatttcctcagtgatcactgattag

SEQ ID NO: 428 - DNA, 385 bp, Homo sapiens
  misc_feature 13, 14, 15, 345, 363: n = A,T,C or G
acagtggcatgannncagcttactgcagccttgggttccctaggcttatgtgatcctcctacctcagcctcctctttactgggaccacaggtgtgtgccaatacacctgactaattttaatttttatagaggagaagtattgccatgtttcccagtttaaacttgaactccctaggttcaagtgatctacctgccccaaactcccaaagtgctgggactacaggcatgagccactgcacctggcctcaggtattatttctatttctattttctacttccataatttctattatatttttcatcttttacttgatattctatttttttctgattttatttagttanctgtgttcccatttaggntaaatttttaaaattaatgtgt

SEQ ID NO: 429 - DNA, 276 bp, Homo sapiens
acttgaaactgcatcataaatgcaacattgtcatatgtgaaaacgacaccctaagtccttctttttaaaaatgacattgcgtttagcttattgtaagaggttgaacttttgtattttgtaactatctttaagctcttcagtttataattcatataaaatgccttttgtatttaaaataatcctattttaatcagtgcatgaaatttgcttttttaaagttcatttgaatgattattccttccctctaaagaaatgattttggtaatgttgagaggt

SEQ ID NO: 430 - DNA, 225 bp, Homo sapiens
acaataaaaatggatcccaacactggacggtcaagagggtttgggtttatcctgttcaaagatgcagccagtgtggagaaggtcctagaccagaaggagcacaggctggatggccgtgtcattgaccctaaaaaggccatggctatgaagaaggacccggtgaagaaaatcttcgttgggggtctgaatcctgaagccactgaggaaaagatcagggagtacctg

SEQ ID NO: 431 - DNA, 483 bp, Homo sapiens
  misc_feature 15: n = A,T,C or G
acctgtgggtttatnacctatgggtttatatcctcaaatacgacattctagtcaaagtcttggtaatataaccaatgttttcaaatgtattctgtcatacaaagagcagatttttattgaacttgtgcaataactatattaccatacaatataaatattcatgaatagtttcccaagtctggagcgaccacatagggagaaaatgtaaatgtctcaatttttgttcacaaaagtatattttatcaaattgctgtaagctgtggatagcttaaaagaaaaaaagtttcctgaaatctgggaaacaagacatttaaagaatcagcaaaatttcaaataaaaaattatgaaaatattatcctcattagttcatttagtcccatgaaattaattattttctctgcttgatcttggtggacagtttcatgaagctgtcagttagttcattaaagttttggaaattctcagacagtgcaggtggtatca

SEQ ID NO: 432 - DNA, 325 bp, Homo sapiens
  misc_feature 15, 16: n = A,T,C or G
acaagccaggtaatnncgaggcctccaggattgctttgttgttaatgttgctttggctaaatgggctgttttattcttccatatgacttttagaatggttttctttttctaattccataaaaagttgcatttatagtttgagagaaatagcacttaatctgtaagttgctttaggcagcacggacattttaattatattgattctttaaattcatgagcatggagtgcctttttacttatttgcgttgtctctattttttttcagcagttttgtagttcttgttgtagagatattttacctccttgatttaatgtattactaggt

SEQ ID NO: 433 - DNA, 512 bp, Homo sapiens
  misc_feature 20, 21: n = A,T,C or G
caggtacctgtgggtttatnncctatgggtttatatcctcaaatacgacattctagtcaaagtcttggtaatataaccaatgtttccaaatgtattctgtcatacaaagagcagatttttattgaacttgtgcaataactatattaccatacaatataaatattcatgaatagtttcccaagtctggagcgaccacatagggagaaaatgtaaatgtctcaatttttgttcacaaaagtatattttatcaaattgctgtaagctgtggatagcttaaaagaaaaaaagtttcctgaaatctgggaaacaagacatttaaagaatcagcaaaatttcaaataaaaaattatgaaaatattatcctcattagttcatttagtcccatgaaattaattattttctctgcttgatcttggtggacagtttcatgaagctgtcagtttagttcattaaagttttggaaattctcagacagtgcagtggtatcagaaacttgtattcaagagtacctc

SEQ ID NO: 434 - DNA, 467 bp, Homo sapiens
acattggaagcttttgtttataggaacttgtagggctcattttggtttcattgaaacagtatctaattataaattagctgtagatatcaggtgcttctgatgaagtgaaaatgtatatctgactagtgggaaacttcatgggtttcctcatctgtcatgtcgatgattatatatggatacatttacaaaaataaaaagcgggaattttcccttcgcttgaatattatccctgtatattgcatgaatgagagatttcccatatttccatcagagtaataaatatacttgctttaattcttaagcataagtaaacatgatataaaaatatatgctgaattacttgtgaagaatgcatttaaagctattttaaatgtgtttttatttgtaagacattacttattaagaaattggttattatgcttactgttctaatctggtggtaaaggtattcttaagaatttgcatgt

SEQ ID NO: 435 - DNA, 379 bp, Homo sapiens
acgaggtggctcgactgctcaacctcaccgagaggcaggtcaagatctggttccagaaccgcaggatgaaaatgaagaaaatcaacaaagaccgagcaaaagacgagtgatgccatttgggcttatttagaaaaaagggtaagctagagagaaaaagaaagaactgtccgtcccccttccgccttctcccttttctcacccccaccccagcctccaccatccccgcacaaagcggctctaaacctcaggccacatcttttccaaggcaaaccctgttcaggctggctcgtaggcctgccgctttgatggaggaggtattgtaagctttccattttctataagaaaaaggaaaagtttgaggggggggcattagtgctga

SEQ ID NO: 436 - DNA, 338 bp, Homo sapiens
ctgataacggacagaaagagaatgcccacaagtgggtcttctgtggaagatgcatggaggaagaaaggagaaaacagagatcctatcagatgaccttacagacaaagcagaggatcatgaattttctaaaactgaggaactaaaactagaagatgtggatgaggaaattaatgctgaaaatgtggaaagcaagaagaaaactgtgggagatgatgaaagtgttcctacaggttatcacagtaaaacagaaggagcagaaagaaccaatgatgatagctcagctgaaactattgaaaagaaagaaaaagccaacctagaggaacgggccatttgtgagt

SEQ ID NO: 437 - DNA, 529 bp, Homo sapiens
actccaacattaccggatctggattggggaggttggtcagggaagagaggggttctacccacagatcaactgtgtaatcttttactattcaagctataattcagcttcaaagtagagtagaaaaaaaattgtcttaactgttctagttcttgatggttttcctccttattaacagttggtatttcttccttggcccttttggactaatgttactgtccaagttctttctcaagaaaccacatctggttcaggagagtgtcaagttggactctttgaactctgttgctgtctgagcaatcgtggtgcctagactttgcattccttgttctgttgacctgcatacatgtgagagctatttctttaagaactatataggctgtgaaaacgcactttctttcccccaaagagctgggaatttatgaagttatggcaatgaactgcagcatgctgggacaattatttgactacttttttttgtaatattgtcaaatgtctctatggattctgacagagatttctttttgttttg

SEQ ID NO: 438 - DNA, 374 bp, Homo sapiens
  misc_feature 10, 144, 165, 166, 172, 176, 180, 191, 192: n = A,T,C or G
ccgggcaggncttggctcctgtggaggcctgctgggaacgggacttctaaaaggaactatgtctggaaggctgtggtccaaggccatttttgctggctataagcggggtctccggaaccaaagggggcacacagctcttcttanaattgaaggtgtttacgcccnntatganacanaatnctatttgggcnngagatgcgcttatgtatataaagcaaagaacaacacagtcactcctggcggcaaaccaaacaaaaccagagtcatctggggaaaagtaactcgggcccatggaaacagtggcatggttcgtgccaaattccgaagcaatcttcctgctaaggccattggacacagaatccgagtgatgctgt

SEQ ID NO: 439 - DNA, 195 bp, Homo sapiens
accattggtggccaattgatttgatggtaagggagggatcgttgacctcgtctgttatgtaaaggatgcgtagggatgggagggcgatgaggactagaatgatggcgggcaggatagttcagacggtttctatttcctgagcgtctgagatgttagtattagttagttttgttgtgagtgttaggaaaagggcgt

SEQ ID NO: 440 - DNA, 84 bp, Homo sapiens
  misc_feature 16, 22, 32, 38, 53: n = A,T,C or G
acggaggcctccaganacccancgaagatganaagaanaagctggcagagaanaaggcttccatcggttatacctacgaggaca

SEQ ID NO: 441 - DNA, 211 bp, Homo sapiens
  misc_feature 15: n = A,T,C or G
acacacagacaaggnatggtgatttagttgatcacagcggttcttaaaaatcggacacaaatattggctaaaaataatcccaaacgtttatatatggctttgaaaataattttatctggcttgcggcatgctttcacatgttatctcttaggattttcacaaagccctgtgtggtaggtataatgcccatcttagagatgaaaaaatgggt

SEQ ID NO: 442 - DNA, 468 bp, Homo sapiens
ggaatgctcctaaatgatcgcaaagtatttgttggacgatttaagtctcgtaaagaacgagaagctgaacttggagctagggcaaaagaattcaccaatgtttacatcaagaattttggagaagacatggatgatgagcgccttaaggatctctttggcaagtttgggcctgccttaagtgtgaaagtaatgactgatgaaagtggaaaatccaaaggatttggatttgtaagctttgaaaggcatgaagatgcacagaaagctgtggatgagatgaacggaaaggagctcaatggaaaacaaatttatgttggtcgagctcagaaaaaggtggaacggcagacggaacttaagcgcaaatttgaacagatgaaacaagataggatcaccagataccagggtgttaatctttatgtgaaaaatcttgatgatggtattgatgatgaacgtctccggaaagagttttct

SEQ ID NO: 443 - DNA, 502 bp, Homo sapiens
  misc_feature 16, 20, 21, 469: n = A,T,C or G
acctatatctgagacncccnnggacttaattctcagattttgtattgattctgaaaacagaattggaaatagtggagtagaagaaataaaaggtcatcccttttttgaaggtgtcgactgggagcacataagggaaaggccagcagcaatccctatagaaatcaaaagcattgatgatacttcaaattttgatgacttccctgaatctgatattttacaaccagtgccaaataccacagaaccggactacaaatccaaagactgggtttttctcaattatacctataaaaggtttgaagggttgactcaacgtggctctatccccacctacatgaaagctgggaagttatgaatgaagataacattcacccataaccaagagaactcaggtagctgcatcaccaggcttgcttggtgtagataacaatacactgaaatactcctgaagatggtggtgctttattgactncaagaggaaattctacaggattaggatttctaa

SEQ ID NO: 444 - DNA, 473 bp, Homo sapiens
acacaaaagggcatagtcctacaaagttgtttatataattgttttatgtgtgcaaattgaaatattaaagatggatcagggatctcagtttaaggaatcctgccttctgtatgatgatgtcttaatttttgagattttcatatattgggttatagctatatatcaggacaggtaaatacattataaaattataacctttataataatttttagtataatcacttgtgtgactataataaattggctttagttttctttactcttcacagttttaataggtaactattttacaagaataacattgctaggtagaaaaatttctgttcagttaggagttcttattttgctgctgaaatgagtcatgcacaattttaaatctctgtagtttcttcataagctattttactatcttactattttataagccttgtgttgcagtcaagtttttaccacattctatagaccttgtctgt

SEQ ID NO: 445 - DNA, 400 bp, Homo sapiens
  misc_feature 84, 226, 304, 318, 319, 345, 368, 369: n = A,T,C or G
tcgtttctttttgagatggagtcttgctctgttgccagactggagtgcagtggtgcgatctgggctcactgcaatctccacctnccgggttcaagcgattctcctgcctcagcctcccgagtaactgggactacaggtgtgcgccaccaagcccagctcatttttgtatttttagtagagatggggtttcacgatgttggctaggatggtctcgatctctggtcanagtcttttctgtaaatatccttggtaaagaagcaatttttagactgtagctgttgcaaatgctttaaggaagaagcanaacaactgtcaagnnttcctgaaatgaagaaactacaccanggctgctatatcagagcaaaccnnaaaccaagcactccaatcatgatgccgacag

SEQ ID NO: 446 - DNA, 530 bp, Homo sapiens
actttcatattttaaacagaggatatcggcatttgtttctttctctgaggacaagagaaaaaagccaggttccacagaggacacagagaaggtttgggtgtcctcctggggttctttttgccaactttccccacgttaaaggtgaacattggttctttcatttgctttggaagttttaatctctaacagtggacaaagttaccagtgccttaaactctgttacactttttggaagtgaaaactttgtagtatgataggttattttgatgtaaagatgttctggataccattatatgttccccctgtttcagaggctcagattgtaatatgtaaatggtatgtcattcgctactatgatttaatttgaaatatggtcttttggttatgaatactttgcagcacagctgagaggctgtctgttgtattcattgtggtcatagcacctaacaacattgtagcctcaatcgagtgagacagactagaagttcctagtgatggcttatgatagcaaatgacctcatgtcaaatat

SEQ ID NO: 447 - DNA, 346 bp, Homo sapiens
actacagaagagagcgccggttcttgccctgagtctgcttctggcagttgggtccctcatcgggtatagtcgttctccaaatgataagtccatcaatgcccttctgatgactgttacaggattttttattggtggaccttctaatatgattagttctgctatttctgcggacttgggtcgccaggagctcatccaaaggagcagtgaagctttggccactgtcacaggaattgtggatggttcggggagcattggagctgcagtgggccagtatttagtgtctctgatccgggacaagctaggatggatgtgggttttctactttttcattctcatgacaagttgt

SEQ ID NO: 448 - DNA, 581 bp, Homo sapiens
  misc_feature 211, 539: n = A,T,C or G
actggatcttttattcttctacctttttcttcagcagtgtccgtatagattaatctcctgacatttccagaactcatcagcagcttttttgggggagcattttcaaatattccaacattctcaaactctatataatcttcagtgacagctgggttacctggtcctgcctccctgacctgcagacatccttcggctggcctctagggctcgngaaggcaaagctgagttagccagccttgcaacctcaattctcagagaagacccctgttcactccaggctgtgaaacactcacatttaccacacactacatgtcagcagtcggcaggtagcctcataggacctttaattgcagaatatgtaaaataagagtcttggacttaaaatgattctttaccaatctgtgatatgaggaaagcacaataccagtaaaatatattttcaaacaggaaactttatcctttgacaatttattaaagggaagagaagtggtaaaattttatctcaatactgtttatatcatgacatactaattgtttgngcctgatttcaagttttaaatgctatctctctgactcattct

SEQ ID NO: 449 - DNA, 427 bp, Homo sapiens
acaactcttaactgtgccagtccccagttcaccagctttgtatccagtcgtcatctcattcaagtatggctttacttggtgacactggccatagctaagttaacttggcatgtttgacttttgacaataacaaaaatggttttggattttgttttatttccaaaaaatgtatacaatatcagaacttcacattttatatactagtatctggctattagtattttacaggaaccatagttcttggtgactacatatatatatatatttttgtgaccttttttgtaaactaagtgccgtttcaacgttacaatcatttttagggttattgtaatcaatgtgaatatcatgttttttcaaatctgttctgagcctatagtgtttgctttgtgaacatgtgtattgtatatattctgtatagttatattgt

SEQ ID NO: 450 - DNA, 506 bp, Homo sapiens
  misc_feature 494: n = A,T,C or G
gagttggcactctacgacttctagatgcagttaagacttgtggccttatcaactctgtgaagttctaccaagcctcaacaagtgaactttatgggaaagtgcaggaaataccccagaaggagaccacccctttctatccccggtcaccctatggggcagcaaaactctatgcctattggattgtggtgaacttccgtgaggcgtataatctctttgcagtgaacggcattctcttcaatcatgagagtcccagaagaggagctaatttcgttactcgaaaaattagccggtcagtagctaagatttaccttggacaactggaatgtttcagtttgggaaatctggatgccaaacgagattggggccatgccaaggactatgtggaggctatgtggttgatgttgcagaatgatgagccggaggacttcgttataagctactggggaggtccatagtgtccgggaatttgtcgagaaaatcattcttgcacattnggaaaaaccatt

SEQ ID NO: 451 - DNA, 322 bp, Homo sapiens
acgatgtctagtgatgagtttgctaatacaatgccagtcaggccacctacggtgaaaagaaagatgaatcctagggctcagagcactgcagcagatcatttcatattgcttccgtggagtgtggcgagtcagctaaatactttgacgccggtggggatagcgatgattatggtagcggaggtgaaatatgctcgtgtgtctacgtctattcctactgtaaatatatggtgtgctcacacgataaaccctaggaagccaattgatatcatagctcagaccatacctatgtatccaaatggttctttttttccggagtagtaag

SEQ ID NO: 452 - DNA, 273 bp, Homo sapiens
actgttgctttaatatgagcttcaatataagaagcaatctttgaaataaaaaaagatttttttttaattctgggtttgattcttaacattgaaacaaacgttaagtatttctaatgatccatttatatttctaatttaattgtgatcttttaataaccctatttatgatctgttgttgtctgtctgctgcttttattgtttatttaaaatcaaatatgttttacaaatgttttttcagacaagattctgtaacatcatgtaaagcttttttgt

SEQ ID NO: 453 - DNA, 163 bp, Homo sapiens
  misc_feature 10, 56, 87: n = A,T,C or G
gaaacatcantttctgactgaagtggagactacaacaactttagtgtttcccttanaaggattacggccatggtgaacttgactgantaaacaatgctataaataaaaagctcttccaaaacattaaccatggtaagcatcattatccccataaaatggtggc

SEQ ID NO: 454 - DNA, 339 bp, Homo sapiens
  misc_feature 15, 16: n = A,T,C or G
actctggggcttgtnngagggtaaaatagagacccagtaaaattgtaataagcagtgcttgaattatttggtttcggttgttttctattagactatggtggtggtgctagaagaatttgagaagaaatactcctgtattgagttgtatcgtgtggtgtattttttaaaaaatttgatttagcattcatattttccatcttattcccaattaaaagtatgcagattatttgcccaaatcttcttcagattcagcatttgttctttgccagtctcattttcatcttcttccatggttccacagaagctttgtttcttgggcaagcagaaaaattaaattgt

SEQ ID NO: 455 - DNA, 206 bp, Homo sapiens
  misc_feature 135, 136, 139: n = A,T,C or G
acaacaaaataggatgttaatccattaccactgttcttccattcgagaggcagctgatggttaaagcgcccgtaacatacatcgattatttttatcccatgactttattgtatgtttagaaaggtggaacagcannaanaaaaagaggctggacaaaagacgttgatgtttttgttcttcagatgtatgcagagctgattatgagt

SEQ ID NO: 456 - DNA, 488 bp, Homo sapiens
  misc_feature 9: n = A,T,C or G
accactgcnaggccactgtttatacatgaaagcatccatgatgaggttgtaaacagacttaaaaaggcctatgcgcagatccgagttgggaacccatgggaccctaatgttctctatgggccactccacaccaagcaggcagtgagcatgtttcttggagcagtggaagaagcaaagaaagaaggtggcacagtggtctatgggggcaaggttatggatcgccctggaaattatgtagaaccgacaattgtgacaggtcttggccacgatgcgtccattgcacacacagagacttttgctccgattctctatgtctttaaattcaagaatgaagaagaggtctttgcatggaataatgaagtaaaacagggactttcaagtagcatctttaccaaagatctgggcagaatctttcgctggcttggacctaaaggatcagactgtggcattgttaaatgtcaacattccaacaagtggggctgagattg

SEQ ID NO: 457 - DNA, 453 bp, Homo sapiens
  misc_feature 10, 11, 13, 255, 256, 272, 299, 334, 342, 345, 347: n = A,T,C or G
acatttgatnncnttggacattctatcaatgattattcaatatctcctgatgggcagtttattctcttagaatacaactacgtgaagcaatggaggcattcctacacagcttcatatgacatttatgatttaaataaaaggcagctgattacagaagagaggattccaaacaacacacagtgggtcacatggtcaccagtgggtcataaattggcatatgtttggaacaatgacatttatgttaaaattgaaccnnatttaccaagttacanaatcacatggacggggaaagaagatanaatatataatggaataactgactgggtttatgaanaggaagtnttnantgcctactctgctctgtggtgggtctcccaaacggcacttttttagcatatgcccaattttaacgacaacagaaagtcccacttattgaatactcccttctactct

SEQ ID NO: 458 - DNA, 376 bp, Homo sapiens
acacttatcatctaaatacctctctcccgtcttctcttttacaacataccatttcaacctgtttgtttaaagaatgaaggccttaaggaaaagccttattcacatccccgtaaaagaaagaaataaatatttgtttctagaatcaatctaactgaacttgactaaatcttgatagaggctccaatcttactcacacataaggcgatggatgatcttttgttgtcaacaaattctcattaagatagctaaacagttaattataattattcaaatgtatttcttgagttcctactatgtgcaaagtatcgttccaaagtagacactcttccttagaaataaagtgggccactgaaatcataacttcaaaagtctagaa

SEQ ID NO: 459 - DNA, 297 bp, Homo sapiens
acaaattctttataactgacttagtcatttgccgcttagcagtttatatactgaaatgaaaacatcttgtggggaaaagtgactttagattatgaactcaattcaaatgaactctatttaaaatggggtcctattttggacaaaggaaattaagaatgtaaaagtcagaacagtcttgaggtaaaaagtgtgctttggcttaaaagggatacagtatattaattacatcttttattattattgtttatttcttagaatcatttctggctttctcaaaacaaaataatattaatgagt

SEQ ID NO: 460 - DNA, 454 bp, Homo sapiens
actggtcctactattatagaatgtttgcttcataagaacaggcactgactgtatcatctctgaacacaatggaatgaagctggcaataacaaaagaaaaattggaacatttacaaatgtgtggaaattaacagatttctaaacaatcaaggggtcaaagaagaaatcacaagggaaattagaaaatactttgagatgaatgaaaacaaaaacacaaaataccaaaactgagagtgtgtgatgacaacagtgtgcagagggaaattcatagctgcaaatgtccatattaagaaacaagacagtaactatgtgaggtgatgggtgttaattagctcagctgtagcaatcatttcataatgtatatcaaaacatcccactgtatactttatacttttttataaaaataaatattcttacaaaaggacaggcgctgtgtctgtctggctcaccattgt

SEQ ID NO: 461 - DNA, 300 bp, Homo sapiens
  misc_feature 15, 236: n = A,T,C or G
accttcactatatcncactttattgttaattaactgcatttttaaaagtagagattggtcttctcttatgtatacttatatccctctaaatttaaatccatcttgccatgttttgtatttaacttgaagtgatctaattaatgagaaaaagaggtattttaaaattaaggtgcatccaaaagggaagcgtaaggatacagagagatctggaaaccttgccttgagagacgtaatcnaaagaacctaggacacgtgccctgaaaatgagacaaggaagacatgtgagaaccatctgcatgt

SEQ ID NO: 462 - DNA, 472 bp, Homo sapiens
acaaatctggggtttggccattaaaagttatttacaacagtgggagaaaaaaagacaagaagttgtttcacattacagacctccccccaccccaaagcctaatacttgcttaccaagtcaaaaaagagacacagttgattcacaggctggaggtttgaacttgagtaagacatttataaaaacctagacggggcagtgtcctccccagcccaggtgccactgggcacagcacaagagactaaaaacaacaggggaaggctggacactcaaggtttgggagtataagcaccccacttctggctcagggatttggggagtagggtaaacaaaacctacttggaaaagaattggggaagaaaaccaacaactgccttatgcaggggtggggacagggaaggaggtagggccagggacaggagcatttcacatcactaacctaacttgggaagctgtaagggaccatcttcaactg

SEQ ID NO: 463 - DNA, 569 bp, Homo sapiens
  misc_feature 30, 59, 61, 62, 484, 496, 504, 541: n = A,T,C or G
ttgcatgttcatgtttaagcagttactgtnacaagaagtttaaagttaattatatcagntnnctaatgcttcatgataggcaactttacccattttgaatgccttaatttaatttttttcaaagtctcagccctgtctgtattaaaaaacaaaaaaagcgtttaccagctcttaggatgtaaactagctttgtggaagataaatcgtgcactatttttacacataaatagttatatcaatgtcagcctattttgattaacaaatgtttttaaagtattattggttatagaaacaataatggatggtgttggaactaatatatccttgatgtctgtctattattcattcaactctttttacagacctcagtattagtctgtgactacaaaatattttatttgctttaaatttgctggctaccctagatgtgtttttattcctggtaaagacatttgtgattacattttcacacttaagattcaanaatttttcccanatataaanaaaactaagacaggctgtagatgcattttaaatattnaaatatgatcctcagacatgcagctgtg

SEQ ID NO: 464 - DNA, 247 bp, Homo sapiens
  misc_feature 8, 10, 11: n = A,T,C or G
acttagantnntataaaccacttcccagagcaggaaaattaaaatgtgaagcagttgttgctgatgtcctagataaaggatccggtgtagtgattattatggatgtctattcttattctgagaaggaacttatatgccacaatcagttctctctctttcttgttggctctggaggctttggtggaaaacggacatcagacaaagtcaaggtagctgtagccatacctaatagacctcctgatgctgt

SEQ ID NO: 465 - DNA, 281 bp, Homo sapiens
acccaaatttccaagacacaaacatgacctatccaagcgcattacccacttgtggccaatcagtggccaggccaaccttggctaaatggagcagcgaaatcaacgagaaactggactttttaaaccctcttcagagcaagcgtggaggatgatggagaatcgtgtgatcagtgtgctaaatctctctgcctgtttggactttgtaattatttttttagtagtaattaaagaaaaaagtcctctgtgaggaatattctctattttaaatatttttagtatgt

SEQ ID NO: 466 - DNA, 566 bp, Homo sapiens
actcatttatttagcctctcagtgcttaataagacttttctttattttttagttagccgttaggttttgtgaggttagattcctggaagcagtgaatttatacactgttatattaatagagctccgttctttgagtcatgattccaagctaaaggaaattaaaaatgtaatttaataatttcctatttttagggttgttaatttttttctacaaaaaaaccttgaaattttagatatcccaatgtgaatctaatttccatatatacagaaattagacaaataataagtctttagttcaacttaagcatatctcaaatgacttctctaaatttaaagttgatcatgataggatcataaaagacagaaaagacttaagtaatcttgtaatgacaattatttccatttttgctgaactaaaaatatttaacttcataaaatatgttactacagcttccagatttaaagaaaaaaagtttcccccactctcaattaaaagttagaaccctccacttttaaaattatacaaatatttcttttttacattacacagaagccttctgtacctg

SEQ ID NO: 467 - DNA, 543 bp, Homo sapiens
acggtagaactgctattattcatcctatgtgggtaattgaggagtatgctaagattttgcgtagctgggtttggtttaatccacctcaactgcctgctatgatggataagattgagagagtgaggagaaggcttacgtttagtgagggagagatttggtatatgattgagatgggggctagtttttgtcatgtgagaagaagcaggccggatgtcagaggggtgccttgggtaacctctgggactcagaagtgaaagggggctattcctagttttattgctatagccattatgattattaatgatgagtattgattggtagtattggttatggttcattgtccggagagtatattgttgaagaggatagctattagaaggattatggatgcggttgcttgcgtgaggaaatacttgatggcagcttctgtggaacgagggtttattttttggttagaactggaataaaggctagcatgtttatttctaggcctactcaggtaaaaaatcagtgcgagcttagcgctgtgatgagtgtgcctgc

SEQ ID NO: 468 - DNA, 195 bp, Homo sapiens; identical to SEQ ID NO: 8

SEQ ID NO: 469 - DNA, 362 bp, Homo sapiens
gtttgacagtctcattttatcactgcgtttgtatctattactaaaatgtattttttgacctcttactgattcattgttggtatgtaccagctgtagccaaaaagatgctggggcagattgtggacaagtagaagcacctccttcccctctgcgacattgaacggcgtggattcaatagtgagcttggcagtggtgggcgggttccagaaggttagaagtgaggctgtgagcaggagcctctgccaggggatgcaccatctgtggggaggggccgagggagactccatggtctctgctgtctgctctgtcctcctctgtggagaagagcttgagttccaggaacgttttgtcaaggctgctgt

SEQ ID NO: 470 - DNA, 543 bp, Homo sapiens
actgccgggtaacgctgtggtttccattgagcctgaactgatgggtgagggcgtcgagtctccaacaagaactgagggtgtagagccgacaggtaagactgttgttgccattgcatctgggctgctgtgggatgcttttgattcctcactacggcctgagattgtggagctatcacggaagtgtgttgtttcagttgagcccaggctgctgtggtagcttgtatgtgctagggcagctgtggtgctaggagttgaagattttgtgtgtgttgtgctgccgtggaaagttgctgattcttcactatggcctgaagttgtggagctttcagggaagtgcattgtttgagttgagcccgggctcctgtggtaggctgtagattcttcaacatggcctgaggtcgcggagcgggcaggtgggggtgttgttgcagttgcaactgggctgctgtggactggtgtcgattcctcactatggcccaaggttgtggagctggcagaaaagtgggtttgttggagttgagctcgggctgctgtgataagttg

SEQ ID NO: 471 - DNA, 575 bp, Homo sapiens
  misc_feature 484: n = A,T,C or G
accattatttggttcctggagttatacactaattttcagtatattactgttaaattaccaacacaaggcaatttatttgaaagattccgtttatcctgccattgctttgaaaagcagcaggaaacgaaatcctttgacttgtatcagcttctgcagagcatctttgttttcctttgtcctttgtttcctaccttttgaatcagattccgttttagtcaggaagacttcttgggaccattcttagtaacctgaaatttcttttttaattgcatgaagtggattgatcatgagcaaatgatgtgcttatttctccctcactgttgaatatctttgaacttgctgttttcaatatgggcagcacaaaggtgagagatacatattaatagtagtatgtattactcttatacattagatacctatatttaaatgaaaggcccaatttgtaaacatatacattcatattctctcttgccccaagttttangaacatgttaggatataggagacttaatttataataatgagagcatttttttattttactaaagccatttttatagtcaactatcttttct

SEQ ID NO: 472 - DNA, 416 bp, Homo sapiens
  misc_feature 10: n = A,T,C or G
actgagacanaacattgtgtctacataagcacaagttgtaacatttcacaacttctaaaaggaatgtcaacaattacaacgatcatgcataccatggtcgataatcacattttagaagcattttcaaccatttctaaagaaatgcttataacattgttatatatagaactactttcaataaactgcaaaacattgatcgacttttccagtatgagctacagtgtcaacacaaaagggaggcataaatgtttaatttatgaaatcagaatggaatatttactgtaaagaaaaattaaaaagctttcaaataaaggccattatcgaaccaacgtgaagagcacaactcgaacttttgagttcattcatcttttaaagctgtcctctcaataacttcagttctaagcactgaattcagt

SEQ ID NO: 473 - DNA, 510 bp, Homo sapiens
  misc_feature 489: n = A,T,C or G
actaggtagtgctgggcacacagtagatgtttgataaatacctgttgatcccatataaataaatacagtagactataattgaaaaggcaataattaggattatttaaaaatagaaaagtattcaagctaagtaattagtgataaagatgggcttgtttcctctgagtttatgatttcagtcagaatcttcaattctgtatgcttaaaaatgaactgatacttatgaagttcaatgtatttctaggatactgaactactacaaactgccaactttatattgtttacatcactcatcaatattgaaaagcataatattatgtgacattgtaaattataatccaatggatcccagctgaacagtcacttatttgaaacaatacaggaaaattatcatctattcctattactaaagttgcatatgttaatcataattctcaattttacatatttgtatttggttacaaactagctaaatgctatcagtgctgncttcctaagttgctgtgtctg

SEQ ID NO: 474 - DNA, 501 bp, Homo sapiens; identical to SEQ ID NO: 341

SEQ ID NO: 475 - DNA, 332 bp, Homo sapiens
acagttagtgggagcacactatataaatcctttgcatgacaccattcaacaatattttttaaaatctacaaaattttaaagtttcacttccctagcaaaatatcttcagtcaagaaattagtctttgaaaattatgaaaattgttgtgggaaatatttatacaaattattactgataatgcacatatattttgaaacattgtttctagaagcaataaaatataacctatttaggagataacccaaatgatttgtaaaaaaattaacttgtagaaaagggaaggatgttgtgtaaaatcaagtcaattatttgaggtttttataatattgagt

SEQ ID NO: 476 - DNA, 449 bp, Homo sapiens
acagcctctcttactgggaagaatcatagcttcctatgacccggataacaaggaggaacgctctatcgcgatttatctaggcataggcttatgccttctctttattgtgaggacactgctcctacacccagccatttttggccttcatcacattggaatgcagatgagaatagctatgtttagtttgatttataagaagactttaaagctgtcaagccgtgttctagataaaataagtattggacaacttgttagtctcctttccaacaacctgaacaaatttgatggaggacttgcattggcacatttcgtgtggatcgctcctttgcaagtggcactcctcatggggctaatctgggagttgttacaggcgtctgccttctgtggacttggtttcctgatagtccttgccctttttcaggctgggctagggagaatgatgatgaagt

SEQ ID NO: 477 - DNA, 183 bp, Homo sapiens
  misc_feature 16, 35: n = A,T,C or G
ctggcctaactcgaangacactacccctgcacctnctactaccacatcagcctttgttaaactatctacaacttatcacagcagcccgagctcaactccaacaacccacttttctgccagctccacaaccttgggccatagtgaggaatcgacaccagtccacagcagcccagttgcaactgc

SEQ ID NO: 478 - DNA, 195 bp, Homo sapiens
  misc_feature 72, 73, 122: n = A,T,C or G
accattggtggccaattgatttgatggtaagggagggatcgttgacctcgtctgttatgtaaaggatgcgtnnggatgggagggcgatgaggactaggatgatggcgggcaggatagttcanacggtttctatttcctgagcgtctgagatgttagtattagttagttttgttgtgagtgttaggaaaagggcgt

SEQ ID NO: 479 - DNA, 488 bp, Homo sapiens
  misc_feature 361: n = A,T,C or G
acctgtgggtttattacctatgggtttatatcctcaaatacgacattctagtcaaagtcttggtaatataaccaatgttttcaaatgtattctgtcatacaaagagcagatttttattgaacttgtgcaataactatattaccatacaatataaatattcatgaatagtttcccaagtctggagcgaccacatagggagaaaatgtaaatgtctcaatttttgttcacaaaagtatattttatcaaattgctgtaagctgtggatagcttaaaagaaaaaaagtttcctgaaatctgggaaacaagacatttaaagaatcagcaaaatttcaaataaaaaattatgaaaatattatcctcnttagttcatttagtcccatgaaattaattattttctctgcttgatcttggtggacagtttcatgaagctgtcagttagttcattaaagttttggaaattctcagacagtgcagtggtatcagaaact

SEQ ID NO: 480 - DNA, 231 bp, Homo sapiens
  misc_feature 13, 14, 105, 140, 155, 171, 189, 201, 222: n = A,T,C or G
ttttttttttttnntttttttttttttatactttgtatagtttattatacaaatgattgatagtaaaatagtgaattttaaagcttcttcctaacctttcattgngaatgaacagtgatgcagggagaagagacattcanaagaaaaatcatgtntgtattattaaactanaagtgataaaatgttcanaatgacaatgtntttaaaaaataataaccttgntggaattgt

SEQ ID NO: 481 - DNA, 450 bp, Homo sapiens
  misc_feature 431: n = A,T,C or G
accattcacatcctcaaaaattcccaactcttagaaattatcatatattggcaagttcatatgattcaacctaatagcttctacctcacaggattattgtgagaattaaatgagaaatgcatgaaatgtttggcacacaggctcatagtaagtgctcaataaatggtggatattattattcttaaatgaatcatgtaattattttctatataataatcaaactcaatcccacttatttgcaacttctgtatcaagttttaagtccaatctatttactggaatacaatgatttagcacacattgatttttcccataaacattcatatgcaatgattgctcactaaaatgcgaaaagggtgaggatacaatatgtgtttttattgtttttggatttggcttctttcacttagcatgttttcgaagttcatctntgttatagcatgtatcagt

SEQ ID NO: 482 - DNA, 476 bp, Homo sapiens
acagtatactgaaattccacttaaatactgaaatattctactaaatgacattgttttgtctaaatttcctccagaaaaatctgttagcatttcttaaaagtccctcagatttgagggaaattctaaattaggacagttttctctccaaataaatataaatgatcttgagtatttttgtttaaagaatgacgtgatttttaagcatggtatatagaagtatgggatgaatcttcaatcttccctaaggtttcaataaataataataaatatagtaataatagccaatcagaggggttaaaaaggtatttgggggggctttttttcctagctctatattcacatatactcatataaaccttaccatggggttactttttggttaccatttccccttccccatttttgattaacctgccctaattctcacctttaatatctaacagatacctttatagaattaacaaaacacatacagt

SEQ ID NO: 483 - DNA, 205 bp, Homo sapiens
accattggtggccaattgatttgatggtaagggagggatcgttgacctcgtctgttatgtaaaggatgcgtagggatgggagggcgatgaggactaggatgatggcgggcaggatagttcagacggtttctatttcctgagcgtctgagatgttagtattagttagttttgttgtgagtgttaggaaaagggcgtacctcggccg

SEQ ID NO: 484 - DNA, 195 bp, Homo sapiens; identical to SEQ ID NO: 8

SEQ ID NO: 485 - DNA, 372 bp, Homo sapiens
actagccagtcaattaggatggctctcatgtttccagtgacttcccgacccagtaggtattttggtctgactgcttgctcttcctcaagttgtctcagataagcataaatatctttcacatattcactacaaaggtttggatcagctccatcttctgcatccacatcatttactgcaagaattacatcagagaaagcctgacacaggtcttcttctgcaggggcacatccagatgtttccattgggcttggagaggcagtatcaaccaaaataggctcaggcgaaagtttttcttctttaacaggctcaggttctggctcaggttccggctctggcactggctcagacactggcactggcaccagcataggt

SEQ ID NO: 486 - DNA, 432 bp, Homo sapiens
acatttgggagtttttatgagaaacttaaatgttattatctgggcttatatctggcctctgctttctcctttaattgtaaagtaaaagctataaagcagtatttttcttgacaaatggcatatgttttccacttctttgcatgcgtttaagtcagtttatacacaaaatggattttattttttagtttaactgtgtttctccgacagctcacctctccctgaccagccagccatttccttcctgtgctccacgttcttctgtgtgattaaaataagaatattatttttggaaatatgcaactccttttcagagatcaggagggatttatgtagcagctatttttactgcaaaagtaattcactggaaaaaaaatgtaatttgtaagaaagctttatttttatctcagctctatgtaaagttaaagttactgt

SEQ ID NO: 487 - DNA, 399 bp, Homo sapiens
cttggccgtccattattttctgaagcagatggttcatcatttcctgggctgttaaacaaagcgaggttaaggttagactcttgggaatcagctagttttcaatcttattagggtgcagaaggaaaactaataagaaaacctcttaatatcattttgtgactgtaaacaattatttattagcaaacaattgatcccagaagggcaaattgtttgagtcagtaatgagctgagaaaagacagagcatatctgtgtatttggaaaaataattgtaacgtaattgcagtgcatttagacaggcatctatttggacctgtttctatctctaaatgaatttttggaaacattaatgaggtttacatatttctctgacatttatatagttcttatgtccattttca

SEQ ID NO: 488 - DNA, 505 bp, Homo sapiens
gatggcgattccgggcaggcagtatgggcttattttgccaaagaaaacacagcagttgcaccctgttttgcaaaaaccatcagtgtttgggaatgattctgatgatgatgatgagacctctgtgagtgaaagccttcagagggaagctgctaagaagcaggccatgaaacagaccaaactggaaatccagaaggcccttgcagaagatgctactgtgtatgaatatgacagtatttatgatgaaatgcagaaaaaaaaggaggaaaataatcccaaattgcttttggggaaagacagaaagcccaagtatattcacaacttgctaaaagcagttgagatcagaaaaaaggaacaggaaaaaagaatggaaaagaaaatacagagagaacgagaaatggaaaagggggagtttgatgataaagaagcatttgtgacatctgcatataagaaaaaactgcaagagagagctgaagaagaagaaagagaaaagagggctgctgcactg

SEQ ID NO: 489 - DNA, 297 bp, Homo sapiens
actaattcacaggatctttgtaggttttatctgaaagaaggatataaaaacttaaaagtcagagcagggaaaggggagtaataaattattaagaacaaactcagtgagacttgacttcacttatgatacatgggtagaaagagcaaaccagccttcttcattctgtttctcaatctttgctcttggattaagaggtgtgaatctcccacttcctgaggtggcatttagtggagaacaagaattaccagtagccccggaagatcttcttgtatttatcccgctgacgggagagacagt

SEQ ID NO: 490 - DNA, 323 bp, Homo sapiens
accgttgcccatgcggggattaatgtgcagagctatgtcccctgaggagcccaccttgaagttgatagcaaagctcttgcctgtgggaggcacatagcccttgatgatgatggttcttcgagctgtgagccctccttgcagcctcccgaaatatggcacaggcgggttgaaggttgggggtccttccatggtagggcaaggtggcatcatcgggggtccctggggccggaggggctggcctccgatgaagttgattgattgaagttgcagatccccatccacttgcaggtgggtgaccatctgtaggggaagccggtgcccgt

SEQ ID NO: 491 - DNA, 174 bp, Homo sapiens
  misc_feature 73: n = A,T,C or G
accattggtggccaattgatttgatggtaagggagggatcgttgacctcgtctgttatgtaaaggatgcgtanggatgggagggcgatgaggactaggatgatggcgggcaggatagttcagacggtttctatttcctgagcgtctgagatgttagtattagttagttttgttg

SEQ ID NO: 492 - DNA, 207 bp, Homo sapiens
acatgtcaaatgccttctgtcccagcacagctcccgtggttccattcaccagggcgatgtttaggcctctgcccacattgtttttcacaggactcatgatcatgcggtcttcaaagcacatagtagggcccacgacgttggcggccccactgcagattttaaacgcaaagtagttggctgggcagggcttgatgaggccacacttgt

SEQ ID NO: 493 - DNA, 207 bp, Homo sapiens
acaagtgtggcctcatcaagccctgcccagccaactactttgcgtttaaaatctgcagtggggccgccaacgtcgtgggccctactatgtgctttgaagaccgcatgatcatgagtcctgtgaaaaacaatgtgggcagaggcctaaacatcgccctggtgaatggaaccacgggagctgtgctgggacagaaggcatttgacatgt

SEQ ID NO: 494 - DNA, 507 bp, Homo sapiens
acagcttagagaaaccactcatgaccgggagatgactaaactgaaacaagagctgcaggctgctggatcgaggaaaaaggttgacaaagccacgatggcccagccgcttgttttcagtaaggtggtggaggcagtggtgcagaccagagaccaaatggtcggcagtcacatggacctggtggacacgtgtgttgggacctccgtggaaacaaacagtgtaggcatctcctgccagcctgaatgtaagaataaagtcgtagggcctgagctgcctatgaattggtggattgttaaggagagggtggaaatgcatgaccgatgtgctgggaggtctgtggaaatgtgtgacaagagtgtgagtgtggaagtcagcgtctgcgaaacaggcagcaacacagaggagtctgtgaatgacctcacactcctcaagacaaacttgaatctcaaagaagtgcggtctatcggttgtggagattgttctgttgacgtgaccgtctgctctccaaa

SEQ ID NO: 495 - DNA, 263 bp, Homo sapiens
acatccataataaaagttactattttagtttgctaacaagaatgatttttaacaagggtgatctggtttaaatagctgatttcctatgtttccattattattttaaatatatattgacatttatgtttaaggaaacaacagagctgaaccagtgaagcacatttcatgataagcactaaagagaaaatatgagatcactaaaatccccaaattacttcataagggaaacagtctgagggatattattaaaaatcaatttaagt

SEQ ID NO: 496 - DNA, 444 bp, Homo sapiens
acagctaagtgcgggggtggcggtggagggaacgaaaattgaacctgtctgcctgtgctgtgtcgtgtggctttatcagcccgaggaagggcaggtgtattctaatttgcacaaaggtgctgggtagactagtggcagctctcatgtgctgcacataagtggaatcagtatgaatagaagaacttgctgtataaaggaatttcatggcaacaatgctggtaagggcaattagcctcgcttaagttgccttttttacacaccaaaactttttacatgaagggctggtttcacatgaatactatactgaaatctgtgctctcaagatctagcagtgaccagggctgcccggcgggggctctcctggcaagtcaggaaggtttctgttgctaatataacatagaaacacattagtgcactgggcctctctgaggtcagcatatttgt

SEQ ID NO: 497 - DNA, 169 bp, Homo sapiens
acccacgtaaagacgttaggtcaaggtgtagcccatgaggtggcaagaaatgggctacattttctaccccagaaaactacgatagcccttatgaaacttaagggtcgaaggtggatttagcagtaaactgagagtagagtgcttagttgaacagggccctgaagcgcgt

SEQ ID NO: 498 - DNA, 266 bp, Homo sapiens
acagtttgttttatatctctttactttttttgttactattttatctggccagcgtaatagttttatttagattttttaaaattctgtagattaaagcaaatgacagttattgaactatcacaaaactattaaactgtggtctcggccgttgtcaccatgccggtcgtccggaagattttccgtcgccgccggggcgactcggagtcagaggaagatgagcaggactcagaggaggttcgattaaaactggaagagaccagagaggt

SEQ ID NO: 499 - DNA, 507 bp, Homo sapiens
  misc_feature 479: n = A,T,C or G
actaatatcccttaatggcagaatgtgataatcatggaattaattattgctaaagtagttttcaaataaaaaaagaaaaaagaaaacaaaacaaattaaacttgacacaatctgaccaaacacgtgtcaatttacaatttcaaggttattttacaaaatacctacatttacacaataggctcccggcagcatttccagacaaatgttcttttaatttatcctgacatgctataaatgaataaattacactatttaaaaattatcatcagtaagttttcctttctcatgggtcagagaaaaagaaatgagcgtgcaaagaagattgagaggaagcgcacgcacacagataacttaaagaagcaggaggggctggggagggtcaacaatcactgaacctcacacagtgtgatgctctccaagggtgaaagtcaactgcttatagccatttcaaaagtattttaaagaaaaatgttttgtanggaaaccctttaatgctttcatttttat

SEQ ID NO: 500 - DNA, 252 bp, Homo sapiens
actgccaggggacagtgttgcctctgttgagccttggctgctgtgggaagctgtaggttcctgactgaggcctgaggtggtggtgctgtcagggaatgctgttgtgtgcgttgagcctggtcggctgtgggaggtggtggattcttcactgacgcctgagcttgtcgtgctggcaggtgagagtgttgtgtccggtgatctggggctactgtagaaggtggtagatttctcactcaggcctgctgttgtggt

SEQ ID NO: 501 - DNA, 501 bp, Homo sapiens
  misc_feature 109: n = A,T,C or G
acctgtgggtttattacctatgggtttatatcctcaaatacgacattctagtcaaagtcttggtaatataaccaatgttttcaaatgtattctgttatacaaagagcanatttttattgaacttgtgcaataactatattaccatacaatataaatattcatgaatagtttcccaagtctggagcgaccacatagggagaaaatgtaaatgtctcaatttttgttcacaaaagtatattttatcaaattgctgtaagctgtggatagcttaaaagaaaaaaagtttcctgaaatctgggaaacaagacatttaaagaatcagcaaaatttcaaataaaaaattatgaaaatattatcctcattagttcatttagtcccatgaaattaattattttctctgcttgatcttggtggacagtttcatgaagctgtcagttagttcattaaagttttggaaattctcagacagtgcagtggtatcagaaacttgtattcaagagt

SEQ ID NO: 502 - DNA, 424 bp, Homo sapiens
  misc_feature 15, 16, 380, 397: n = A,T,C or G
accctaccttcagtnntctctttgtaagttggtgacttgcatctgtggccttgaatattttattatcacatgtggcataacagtatccacactttttagttctttattttttttttttattttgagcaattctcctgcctcagcctcccaaatagctgggattacaggtgcatgccaccacacccagctaatttttgtatttttagtagagacaggttttcaccatgttagccaggctggtctcaaactcctgacctcagatgatccgcctgccttggcctcccaaagtgctgggattacaggtgtgggagccaccatgcctgacccacacactttttacttgtataagatgatttttggcttggacataaaagccaaanccacccatttgcttttnatccaaagaacatgtatagttttttgt

SEQ ID NO: 503 - DNA, 591 bp, Homo sapiens
  misc_feature 574: n = A,T,C or G
acagtgttgcccttttcagcaaatgccaattccaagttccattaaatcagaagctccatggctccttggcccacgatgttgagtgctgactgtgtgttctactgaaagagtaaaacactgactatccaaagagaaatggatattttgtttttataataaccatatattattgttttcttcttccctttctatgcaagtgtaaattaatgaacagagaggtatttggaaatggtaatacatttgtcacggatttgtataatgtatacagcattgggaaagtgggtgggggctttctaatatgataccgtctttttaataactatgacaaagcttacataagaattagaagaccactttacatttttacattccttctgctgttcatattaaccttgcacaattacttcattttttctttgactcttttaccacaatgttttggttaatttataatttatcagccatatgtttatcagccatataaccaactagatcccaaatagatccatgtatttgttttccgtgatttggccacattaataaattcataaattgcaatcaaatatcttatatntacacacatatagttta

SEQ ID NO: 504 - DNA, 227 bp, Homo sapiens
acagaatagagcagccaggcccaatgtggaagggtgggcttggtttcctgacaagccaggttagaccaataatggttgaagaggctgccctgggctcagaatgggcagctggtccttgcctgggagaactttgtggaaggaaaaggtaagattccttaagtccaaggagagaaccaatccagggtcaaatttcttttcattccctggatcacaacacaccagggaag

SEQ ID NO: 505 - DNA, 403 bp, Homo sapiens
accgccttatggagtatacgggcaaccatggaatcaacaaggatttggagtagatcaatcaccttctgctgcttggatgggtggatttggtgctcagcctccccaaggacaagctcctccccctgtaatacctcctcctaaccaagccggatatggtatggcaagttaccaaacacagtgagccgggactctaaaaaaaaattgtaattcatgataggcttcgatttcctgtgacactctgaagacatgaaagtagacatcggaaaatgaaaatatttattttaaaaattgaaatgtttggaacctttagcacagatttgctttggtgaaggacacgtgtcttctagttctgcctttttaagtttttgttcatgatggatatgaacatgatttttctttatgt

SEQ ID NO: 506 - DNA, 210 bp, Homo sapiens
actcgtaggttcagtaccattggtggccaattgatttgatggtaagggagggatcgttgacctcgtctgttatgtaaaggatgcgtagggatgggagggcgatgaggactaggatgatggcgggcaggatagttcagacggtttctatttcctgagcgtctgagatgttagtattagttagttttgttgtgagtgttaggaaaagggcgt

SEQ ID NO: 507 - DNA, 187 bp, Homo sapiens
  misc_feature 13, 14, 15: n = A,T,C or G
acttcccaccacnnngttgaaagggagagcaaagtcttatggataaaccctcctttcttttggggacacatggctctcacttgagaagctcacctgtgctgaatgtccacatggtcactaaacatgttatccttaaaccccccgtatgcctgagttgaaagggctctctcttattaggttttcatgg

SEQ ID NO: 508 - DNA, 189 bp, Homo sapiens
acacaagtgatatttacattttcatatactagtgatatacctgttgcatacttggcaaaataaaactgatagtaagtctataataataaaagaaacaacaattactaagtaaacaattctagatgatggaagagtaacccccatttaagctacagacttagatgtctaaaaatatgtgtcctgatctgt

SEQ ID NO: 509 - DNA, 532 bp, Homo sapiens
  misc_feature 141, 420, 421, 436, 442, 445, 491: n = A,T,C or G
acagtgatagctccccctgggcaatacaatacaagaacagtgggttttgtcaaattggaacaaggaaacagaaccacagaaataaatacattggttaacatcagattagttcatgttacttttttgtaaaagttaaagtanaggggacttctgtattatgctaactcaagtagactggaatctcctgtgttcttttttttttttaaattggttttaattttttttaattggatctatcttcttccttaacatttcagttggagtatgtagcatttagcaccactggctcaatgcgctcgcctaggtgagagtgtgaccaaatcttaaagcattagtgctattatcagttaccaccatttggggcttttatccttcatgggttatgatgttctcctgatgacacatttctctgagttttgnnattccagccaaaganagaccnctncactatttgatggctggctgcatgcagacatttaaagcttttaggngaatacactacaccagggagtatgactactagtatgactat

SEQ ID NO: 510 - DNA, 200 bp, Homo sapiens
actgttcctcacggcagtcaagaggcccaggctctgtgggctccagctctgcatttcctggttctggggttggggctgggatgacttcctgtggacttgctgctgggactggaactggaactgttcctcggagggccgaggagtcacctcttgataatcatagtagtctgggttgtcgatctggtcgctatagtgggtgt

SEQ ID NO: 511 - DNA, 276 bp, Homo sapiens
acagcaaattctatagtgcttctgagcccagcagggctttacctgcccctggagagttttagccgtcttgtgtttcttgtttacttcacaaccaaatttgtcccctcttctctctgttaagggagagaagtcactttagctggataatacctatgtaacaaactgagcagctgttatttgggcaaaatcaaaggaagaaagagactatggtcttctatttattgtgggaaggaaaacagggtggggcgggtgagtgaaaaggtgaaaatccctggt

SEQ ID NO: 512 - DNA, 227 bp, Homo sapiens
acggcagccttcaatgggaaggacttaggttccatgagccacctcacaggttatgaaacagaaagacagcgtcacaacactgctcttctggctgctacagacttactaaaaaggctctattctaccagtgcctccccgcttgtgttgctcaggacgtggggcttgcaggccacaaatgcagtgtctccactcaaagaacagattatggcctttgcaagcaaatgagt

SEQ ID NO: 513 - DNA, 414 bp, Homo sapiens
  misc_feature 12, 13, 130, 296, 297, 365, 388, 400: n = A,T,C or G
acccttgaaaanngaatggaatctccaggagtgagggtttccatggaagccagcactatccttggggacaccactgaccattaacagattaggaagatgtgcccattttacacacagagaagcagcccanagttcagtgccctgcttcagggcagagaccaagttggggagtcaggaactgaaagctgtcttagccagtttgggggtagggtggggtctcaggcctttggcccctgtgactccaagtataaggcatatatgaaggctagtgagctggggttgggatgggatggcanngtgaaaggtcagcatattcctgcctgcaaacccctccccagccttgattgcaggtcagaaggctgcanggggatgtccctatgctggctgngagttcccagcnactcccttgtggtc

SEQ ID NO: 514 - DNA, 440 bp, Homo sapiens
actagatgaagcttatatgcttcaattccctgcatcaggtaactaaggtgcacatcagtagttagttatgttctgtcctttattctctgagttttgagttctgcttttctatgcttttcacgtggtatatattaagctaatgaaggcaattaactaagcttttagaactgcaaaaaaaacaacaacaacaacaacagaggcacaggataccattgtgtcagttccttgtgcaatggaccactgacagatattaactaagtgtttagacaaacacacaaagccacactggagagtcagggccagtattaaagctaatctcatatttatagggcatgttacagtttacaaagccatttcacaaaaatgatctcatttgaactatacctcttgtccatccatcaccccaacacacataaacatagctagatcaggatgtgtgt

SEQ ID NO: 515 - DNA, 324 bp, Homo sapiens
acatgcagaattgtcaactacagggaatgaaaagttcaaaaagtagatcctacaagatgtaacgaatacttttctaaacatcaagatacagctcagaacacttcaataacaagatttggtctacttaggcatccggcttgacagctaaacactttagaccacaaagttaacatcatgttacatacgtcttacagtgcacgttaccccaatctgtgaaaataaaccaacatgaaactcaaaaagcattactagctctgctttagtgcctaaggtatcacagcatcacttagtagacagaaatcttatcttccccttaaagtagtt

SEQ ID NO: 516 - DNA, 505 bp, Homo sapiens
actgccaggtaacgttgttatttcagttgagcctggactgatgcgtgaggttgtagattctccacgacctgaggttgtggagtgggcagatgagggtgttgttccacttgcatctgggctgctgtggaatattgttgatttctcactgtggcccgaagttgtggagctggcagggaagtgtgttgttggagtcgagcctgggctgcggtggtaggttgtagattcttcaacaggggctgttgcggtgctaggaggtgaaggcgtcgtgtgagttgaggctgggtgggtctggaaggtggtagattctccctgaagtccagggcttgtggagctggcaggggacagtgttgtgcgtggtgagccagtgctgctgtggacgcgtgtagatgcttcaacgatgcctgagcttgtggtgctgtcagggaagagtgttgtgtgagtggagcctgggctgctgtggaaggttgtagattcttgaccaaaggataaggctgtggtacctgcc

SEQ ID NO: 517 - DNA, 573 bp, Homo sapiens
  misc_feature 481, 519: n = A,T,C or G
ttgaactgccatgtcctctgaagaaggaaagctcttcgtgggagggctcaactttaacaccgacgagcaggcactggaagaccacttcagcagtttcggacctatctctgaggtggtcgttgtcaaggaccgggagactcagcggtccaggggttttggtttcatcaccttcaccaacccagagcatgcttcagttgccatgagagccatgaacggagagtctctggatggtcgtcagatccgtgtggatcatgcaggcaagtctgctcggggaaccagaggaggtggctttggggcccatgggcgtggtcgcagctactctagaggtggtggggaccagggctatgggagtggcaggtattatgacagtcgacctggagggtatggatatggatatggacgttccagagactataatggcagaaaccagggtggttatgaccgctactcaggaggaaattacagagacaattatgacaanctgaaatgagacatgcacataatatagatacacaaggnaataatttctgatccaggatcgtccttccaaatggctgtatttataaaggtttt

SEQ ID NO: 518 - DNA, 473 bp, Homo sapiens; identical to SEQ ID NO: 200

SEQ ID NO: 519 - DNA, 555 bp, Homo sapiens
  misc_feature 419, 422, 512: n = A,T,C or G
acaaattccagtgtgcagaccacaacctcaaaacaaaaaagatctatttctactggatctgcagggagacgggtgccttttcctggttcaacaacctgttgacttccctggaacaggagatgggggaattaggcaaagtgggttttctaaactaccgtctcttcctcaccggatgggacagcaatattgttggtcatgcagcattaaactttgacaaggccactgacatcgtgacaggtctgaaacagaaaacctcctttgggagaccaatttgggacaatgagttttctacaatagctacctcccaccccaagtctgtagtgggagttttcttatgtggccctcggactttggcaaagagcctgcgcaaatgctgtcaccgatattccagtctggatcctagaaaggttcaattctanttnaacaaagaaaatttttgagttataggaataaggacggtaatctgcattttgcctctttgtatctttcagtaatttacttggtctcgtcangtttgagcagtcactttaggataagaatgtgcctctcaagcct

SEQ ID NO: 520 - DNA, 81 bp, Homo sapiens
  misc_feature 14, 15, 26, 27: n = A,T,C or G
aggatcgtggtctnncctgcagcatnnaggcccaccatgaggatgcgcatttcttttttgccaaaaaggcccttgaagagg

SEQ ID NO: 521 - DNA, 576 bp, Homo sapiens
  misc_feature 14, 212, 253, 414, 457, 541: n = A,T,C or G
gagaaatttagtanattctctttgttagaaactagagttttgaacaattttaaagactataaaattgtttttttttttttttttttaaataaactagttacttgcactttacctgctggcttttccatttggtagataacattctgaactccagcagagttttataatccccacgtgcttaaatatactaaatgttctttttccattaaggntaatgttcgtgaagaaattgaagagttttttccaagaatgnggaagataaatcaagataaaagaaggctaatgaaaagtattaaagatcagaaaattaaaattgaatgggggaaaaaattgaacagaagattggtcagatagaagcacttgaatatttttttaaggctattttgaattgtttgaattggggaagaatacacnaagtatgaaaaatgaaaaactcaatgaagaatgaagagaagtngaaagcaagagtgaagtagaattaaaagaatctggaagaatgaatgggtcctaggttaagtaaatgtatggtttatgttccagngtctgtatgatcaagttgtagatgaatttgcatga

SEQ ID NO: 522 - DNA, 305 bp, Homo sapiens
  misc_feature 16, 270, 271, 291: n = A,T,C or G
acaaagtgacatacanttggaaatccatttttgttgtaaagacattgtttttcagacttttcagatcagttagaaaaatgtcattgctttaaaatcatagctattctgtttaagaggaattgaatttaaaaatgagagagtattaaaactcatgtggcagtatcctggtcttaatcaggtattgcagtgttcaaacaaggtatggacacatcaacatattcaccttttggaaggactagtgacttggttaaaaactaatgagtgtttgcnntgtggtgtttctatgcgagncacccattctcaat

SEQ ID NO: 523 - DNA, 286 bp, Homo sapiens
  misc_feature 13, 14: n = A,T,C or G
acctgagatattnnacagctggacctagtttcacaatctgttgtctccagctctgcatatgtctggccagggggcttctaggaagtaggtttcatctatcaaatgtctcctctgacttccttttgaaacttactgctcttctgttttattttgttttgtttgaagctcagagggagatgggcaattgacagggatgcaatccagggtgggatttcttgaggaagttacaaataagcttgttacaacatcaagatagatggaattggaaggatgctaccaggagagt

SEQ ID NO: 524 - DNA, 170 bp, Homo sapiens
accaagcacttgtatttccgtatattttgtttcgcgggggagtgagggggaagaacacggatgaaaatgtcagtttttgaagggtccatgcacatccctgacacctcacaccttatctaagtctgaagctggggagaaaggggttcatttagacttcatacatttccagt

SEQ ID NO: 525 - DNA, 557 bp, Homo sapiens
  misc_feature 552: n = A,T,C or G
acagacattttctttgtgggtgccttcaggattatataaaaacctcttaaaatttcaacaatatattttgaagtggtgaaatttaaattcgggctcatgcacaaattatttcttattacatctgtcctcaacttagttattgatgtcactaaacatatctatttatgttatgtatttattaacagatgctcattattatttttagcttttatctttaaattttagagaatagttaaataaaacattttttggtattataataatgctacaggatattttttctataatatttgcatatctttatatctttcctagaaagctacctatttttatatgatagttttgttttttagcatcatatagttttaataggaggactcttctcagcattttttgtatggcacatgtagtgttgatataatttttccacgtttggttatctttagaggtctttgctttttcttcatttttgtagcacagttttgctggttatgttattcttacataggaagctatttttcgcttggcacctcaactatagcacacaatttncttct

SEQ ID NO: 526 - DNA, 476 bp, Homo sapiens
acctacaaaggtcacaagacagttgtcactggagagcagatatgggagatccagaaggatcaacttctatacaatccattcttaaaaatgtgcctttcagcaaatggagagcatccaagtttagtgtcatgcaactcatcagatccactccaaaaatggatacttagccaaaatgattaagtgttccttaaaattaagttgaaaaaggaaatattctttctcataaaactgtgactaggcatacactgtagtttttgaaaattatgcaaaagcagctaaatgtaacttattccaagtgcatttttcttatttatatctttatgtagcactactacagaaattctgcaagtttctgtttcaaagcacaataactagtaataccaaagactatttcaaaatgtccagatgtaggggaagagatgtttacagtatgatgaaaataattttccaagtaaagtgatgtttgtgtgttttgt

SEQ ID NO: 527 - DNA, 437 bp, Homo sapiens
gctggatgcttacttgaagacgaggacttttctggtgggcgaacgagtgacattggctgacatcacagttgtctgcaccctgttgtggctctataagcaggttctagagccttctttccgccaggcctttcccaataccaaccgctggttcctcacctgcattaaccagccccagttccgggctgtcttgggcgaagtgaaactgtgtgagaagatggcccagcttgatgctaaaaagtttgcagagacccaacctaaaaaggacacaccacggaaagagaagggttcacgggaagagaagcagaagccccaggctgagcggaaggaggagaaaaaggcggctgcccctgctcctgaggaggagatggatgaatgtgagcaggcgctggctgctgagcccaaggccaaggaccccttcgctcacctgccccaagagt

SEQ ID NO: 528 - DNA, 249 bp, Homo sapiens
acattaaagattttttccaagtaagttacactctgttaacttcctgctagccatcagcatgagccctactgcctaaacactatttcatttatttatgtttggaaaccccgtaaacatttttgtttgcaatcttgtttcttttgttataagtcaagtttgaatgttacaatacttttattgaaacttttgttaagttttttcttgtaaattttctttacttgtgagtatcatcttgtcctttaatcctgt

SEQ ID NO: 529 - DNA, 504 bp, Homo sapiens
acacttctgaaaactgcatattcactttatgtggtttcagaatactgggctcaatactaagaaagacacttcattgagaaattcttaagcttacagaaaacctatactctttgcacattccacataaccctagcaaaatgcagtttcttcatacttctgtcactttttccattggaagatttgcttaggaaaattaattcctatttattcccacaaaatgttggcattgcttgattttacccaatggggaatgtgctttgaatttttggaacacttttacaattaaaaataaagtagggccatttttaatttgtttcatcagaaactatgttaaagagagggttaaatataaatatattttcgtgtgtatttttgggaagatttttgttcaaagcaatagtcaaaatcagatgacctgtccataataattatgtgtcttcatcttctcagaggccccatgctcatatgcacgtgtcattgggatacactcttgggggatttggt

SEQ ID NO: 530 - DNA, 481 bp, Homo sapiens
  misc_feature 410, 427, 459: n = A,T,C or G
acctgtgggtttattacctatgggtttatatcctcaaatacgacattctagtcaaagtcttggtaatataaccaatgttttcaaatgtattctgttatacaaagagcagatttttattgaacttgtgcaataactatattaccatacaatataaatattcatgaatagtttcccaagtctggagcgaccacatagggagaaaatgtaaatgtctcaatttttgttcacaaaagtatattttatcaaattgctgtaagctgtggatagcttaaaagaaaaaaagtttcctgaaatctgggaaacaagacatttaaagaatcagcaaaatttcaaataaaaaattatgaaaatattatcctcattagttcatttagtcccatgaaattaattattttctctgcttgatcttngtggacagtttcatgangctgtcagttagttcattaaagttttggaaanttctcagacagtgcagttggta

SEQ ID NO: 531 - DNA, 210 bp, Homo sapiens
tactggtgtttaatgggggaagaatatgaacagctttaaagagctgtgtattgtggttactactattaaaaaataagatctgcacgagtctgactggcctttgggtggcctttgtggacggctcgtagctggaaagtgttgatctgggttttctggcattcttttaagttaaaaagttaacatcgggacatgggtttgatcttttgttgt

SEQ ID NO: 532 - DNA, 234 bp, Homo sapiens
  misc_feature 15, 17, 18: n = A,T,C or G
caggtactgcaatgncnngctacataaaataaaaaaatctttttaagaggaagctcaataatcagaggctgtattgcatttaaggatttaacactggctatatacaaaagggaaagcatttcaatgagaaatacttcacgttaccaagttctctcctttaatatggcaacattcagcagcttatgctactcttttatcctttggttcccagtgacaaacaatgcagtaataatg

SEQ ID NO: 533 - DNA, 411 bp, Homo sapiens
  misc_feature 12, 336: n = A,T,C or G
acctgtgggtcnattacctatgggtttatatcctcaaatacgacattctagtcaaagtcttggtaatataaccaatgttttcaaatgtattctgtcatacaaagagcagatttttattgaacttgtgcaataactatattaccatacaatataaatattcatgaatagtttcccaagtctggagcgaccacatagggagaaaatgtaaatgtctcaatttttgttcacaaaagtatattttatcaaattgctgtaagctgtggatagcttaaaagaaaaaaagtttcctgaaatctgggaaacaagacatttaaagaatcagcaaaatttcaaatnaaaaattatgaaaatattatcctcattagttcatttagtcccatgaaattaattattttctctgcttgatcttgg

SEQ ID NO: 534 - DNA, 418 bp, Homo sapiens; identical to SEQ ID NO: 310

SEQ ID NO: 535 - DNA, 220 bp, Homo sapiens
acaaaaccataatgatgttcacaggaacttcattacaacaattcactttaaaacattctgcaaatatataacttccttctcctcaattttagaaaataaatttcacatcccaacatataaaacagatacactcctacttctctcaaattagcattttaacatcttccaataacacaccattttcatataaaaatacctttaaaccaaggttcattcctgt

SEQ ID NO: 536 - DNA, 421 bp, Homo sapiens
actgctatttttaaaaccaaaaagagacagcgtgacgatgcgtaaagcatttttcttagcctttcctttgtcttgatctgttaatgagaacaaaactgccagactcaaaatactctactattgtgctgaaagaaatacaatttagattgcacaaaatttgaaaatataactcagctgtcttttaaaagagttgtgttgttatctacaagactattagcagtcttttttcagagcaaattttaacagctagttgtgagtggtttaaaatatagaaaattattaaaatcttagtttgaggggttttatagtgggagaaaaaacaggaccaaagtttatgtgccttcttcagtagtcttaattgaccttttcttcctatttgagactaaagtagtatcagtattctggttttcaggaaatatgt

SEQ ID NO: 537 - DNA, 76 bp, Homo sapiens
gttttctttatttctttttcagatagtttgttgttagtgtatagaaatgctactgacccttatatcttgattttgt

SEQ ID NO: 538 - DNA, 274 bp, Homo sapiens
  misc_feature 119, 255: n = A,T,C or G
accccagagcctagcaggccgacaagcaaggactctagctcccccagagctctgggcctgccccattcagagtgagcatctagacatggccccatttttcagtgacctgggaagcgaanaagaggaggtggaattttggccaggacttacttctttgacattgggatctggacaggcagaagaagaagaggaaacctcttcagataactctggtcagaccagatattattctccctgcgaagagcatcctgcagnagaccaaccagaatgaagg

SEQ ID NO: 539 - DNA, 349 bp, Homo sapiens
  misc_feature 331: n = A,T,C or G
acaataaataattatttaaaagtcatagctccagtcactactgaaaacataattttggtgataaacataatttgagaaacttaatttctgaatgtttttatagaaaattactgaaagtctattactcatggaagacttttaaagaataaccttttttcctgttttataaattcccattgttatatggtagtatttcagctacacaatattttagcttttagctagacatttatagcttttcatttgttgaaatggtaatcatctgcatgtttttgtcacttatttcaggttagtgattgcctaacacttataagccaaaataatctttgcnaaaattccatacctaaaa

SEQ ID NO: 540 - DNA, 129 bp, Homo sapiens
  misc_feature 9, 48, 71, 74, 123: n = A,T,C or G
accattggnggccaattgatttgatggtaagggagggatcgttgaccntcgtctgttatgtaaaggatgcntanggatgggagggcgatgaggactaggatgatggcgggcaggatagttcanacggtt

SEQ ID NO: 541 - DNA, 220 bp, Homo sapiens
acttgaaacagttctgtgtttgttttttttccttagcgtttagaatagccatcattgtcctgcaataggcagagctatcacgtccaggaaaaatgagggagggaaccacagaggcagcgtgagatccaaatacagcattcaaaggtaattggtccagtggtgcctggggagggaggaagggtgatactccagggttagccgtcttcttttgggggtgtgt

SEQ ID NO: 542 - DNA, 482 bp, Homo sapiens
acctgtgggtttattacctatgggtttatatcctcaaatacgacattctagtcaaagtcttggtaatataaccaatgttttcaaatgtattctgtcatacaaagagcagatttttattgaacttgtgcaataactatattaccatacaatataaatattcatgaatagtttcccaagtctggagcgaccacatagggagaaaatgtaaatgtctcaatttttgttcacaaaagtatattttatcaaattgctgtaagctgtggatagcttaaaagaaaaaaagtttcctgaaatctgggaaacaagacatttaaagaatcagcaaaaatttcaaataaaaaattatgaaaatattatcctcattagttcatttagtcccatgaaattaattattttctctgcttgatcttggtggacagtttcatgaagctgtcagttagttcattaaaagttttgggaaattctcagacagtgcagtggta

SEQ ID NO: 543 - DNA, 127 bp, Homo sapiens
aagaaaaatgcccccgttgttggaagtatacagcggagtcttcagatacactgtgtcctcgatgtgcagaagttgtcagtggaaaatagtattaacagctcactcgagcaagaaccctcctgacagt

SEQ ID NO: 544 - DNA, 448 bp, Homo sapiens
actcatccacttttcattttagaaataaacaggcctaagaaacgaaatatcctgcctgaaataatagattggtaaccttcctagtagaaaagtgtcaaaaatccaggatattttgagataagatacaccgatcacatacagaaagaggttttctttttctattttttcccttttttaatcatgtaattatcacaaagacaaaaacagaagctttttttaagtttttttttttttttctttttttgagtcgagggtctcactctgttgcccaggctggagtgcagtggcttgatcatggctcaatgcaaccttgaactcctgagcccaagcaatcctcctgcctctgcctctgcctcctgagtagctgggactataggtcaccaggccagggtaatagagatgggggtatcgctgtgttgcccaagctggtctcacctcaagtgatcct

SEQ ID NO: 545 - DNA, 325 bp, Homo sapiens
  misc_feature 226, 260: n = A,T,C or G
acagcattctggaataaagcaagagtgttcattcacacacacagtagcttcaaaactgttcgatctgtttgttcccatgtagttttctaaagatggaaaaaaaggactttggtcatcaagactactgtggccatattagattactggaacatctaagcatcagtgtgtgaccatgcgaacaaaagacttcggggagtgtctatttttaaaaaggtttatgtgtgtngaggcagttgtaaaagatttactgcagaatcaancccacttttaggcttaggaccaggttctaactatctaaaaatattgactgataacaaaaagtgtt

SEQ ID NO: 546 - DNA, 281 bp, Homo sapiens
  misc_feature 218: n = A,T,C or G
actgcggccgttaaacatgtgtcactgggcaggcagtgcctctaatactggtgatgctagaggtgatgtttttggtaaacaggcggggtaagatttgccgagttccttttactttttttaacctttccttatgagcatgcctgtgttgggttgacagtgagggtaataatgacttgttggttgattgtagatattgggctgttaattgtcagttcagngttttaatctgacgcaggcttatgcggaggagaatgttttcatgttactttatactaacatta

SEQ ID NO: 547 - DNA, 396 bp, Homo sapiens
  misc_feature 12, 13, 114, 326, 327, 328, 363: n = A,T,C or G
gctccatctgcnngactcacccttctatagaagtaaatttgccttgctggagtgttaacttgttgttggagtgctaactcttctttgtggcaccaaaaagttatttccaacacnaagctgcacccttggtggagggaacatctgacgaagttcaatgtttggggaaaacaatatctggaaagattgaagagtcagcaggagaaacacctaggaaaattacaaggcctgtgaaagaaacatctgagaaatttgcatggccacaagaaagacctacaaaggccacatgggaggaaaaagaaacatctgtaaagactgaatgcgtggcnnngagtaacatctaataaaactgaaagtttttggaanaaggaacatctaagatgatcacatgtcctacaa

SEQ ID NO: 548 - DNA, 295 bp, Homo sapiens
  misc_feature 186, 232, 251, 252, 268: n = A,T,C or G
acaattttggataaatagcacatttataagaaccgcaatgaaaactgacttgaaataatgcttgtaatcaggaaagtaatttcatccaccgatttcaaaaccagattcactgagcataaaagtcaatacatatttgaggaataagtctcctaaaattttaagcttcacgtaataatgtttgcatancaaaatatttctgcttcaagcctttaggaattaagatctgatcagnaatttaactaaagggtagnntgttttacaatgaagnactaaaacctgaacaagatgttgcatg

SEQ ID NO: 549 - DNA, 518 bp, Homo sapiens
acagattatttgttatgacaataaaacactcaaaataaatggtctttagcatctcaaattccaactgaaatcattttagtattaactcttcttcccaaagcaatgtctcatttcttggctgtgcaggtgatgccatgttatatccaataactagaaaaatcactgtgctgaacttttatgtttagcttccaagtatttttctaatgttttgcatttcaagtggtatcactgttaaatgccatttgttttcagattgtggccttttattattggctgctagatcctggtgtttctatgttcttttttaagcaccaaaaagaagatggggaagaaaagaaggaaaattttctgatataaatatgttgttcaaattatgagtattatttaaaaaagaaaaaggaacataacccaggagtctaagttaaatctaatattgttaatactgaacttgcaggtccaggttggtatacattccacccctctagaagtattttcttacagtagataagctgctcaca

SEQ ID NO: 550 - DNA, 118 bp, Homo sapiens
  misc_feature 15, 30, 71: n = A,T,C or G
ttttttttttttttnctacttaaaaaaganaagttttattagggcaatttcactttatttttccatacagnaaagtcaactactgcagtaataataaaataagcataaaacaaattgc

SEQ ID NO: 551 - DNA, 451 bp, Homo sapiens
  misc_feature 380: n = A,T,C or G
actcttattcagttccttggtgatgctattgttttgccagcgggagcacttcatcaggttcagaattttcacagctgtattcaggtaactgaagattttgtgtctccagaacatcttgtagagtcatttcatttaacacaggaactgagacttttgaaggaagaaatcaattatgatgataaactacaggttaaaaatattttgtatcatgcagtcaaagaaatggtgagagccttgaagatacacgaggatgaagtagacgatatggaagaaaattaagtgtgatccagtttgatatttttaggttgttgaactgggattacttaaccttgaatgatgatatgtatgcacactgactttaagcttcataaaaccatcantgccaagaaatttctctttgtagtaatttacttgttactgacaccacagcagtatagcatatgtcacagct

SEQ ID NO: 552 - DNA, 182 bp, Homo sapiens
accgatggaattggcacagtcgctttttgttaaatggatcccaaatatttacaaagccatcagaaccacctgtggcaaatgtattgtggatattgtgaaaagaaatggcattgactgggtaaatctgctcaatattattttcttttagtctgtgacatttgaaggcatacttcttcttctgt

SEQ ID NO: 553 - DNA, 227 bp, Homo sapiens
  misc_feature 145, 198, 209: n = A,T,C or G
ttttttttttttttttttttttttcgctctaaagatactttttatttaaatattttatgatgatacatatacaaatataatcttccaaaaaacaaatgtaaaactaatacaaatcactttttcaggaacaaagaaaatcatttanaaaatgtgattatgctaaaagaggcaggttaggtttccaaggctgctcaaggnggaagcttaanaccaacttttgtttgagt

SEQ ID NO: 554 - DNA, 212 bp, Homo sapiens
acagaaaaatggtgatggagacaattgagaaaattatgggtaatttgggagcagcagatattgatcataaacttgaagaacaactgattgatggtattctttatgctttccaagaacagactacagaggactcagtaatgttgaacggctttggcacagtggttaatgctcttggcaaacgagtcaaaccatacttgcctcagatctgtggt

SEQ ID NO: 555 - DNA, 180 bp, Homo sapiens
  misc_feature 21, 89, 166: n = A,T,C or G
acagggaggaatttgaagtanatagaaaccgacctggattactccggtctgaactcagatcacgtaggactttaatcgttgaacaaacnaacctttaatagcggctgcaccatcgggatgtcctgatccaacatcgaggtcgtaaaccctattgttgatatggacntctagaataggatt

SEQ ID NO: 556 - DNA, 376 bp, Homo sapiens
acaattaacacaaaatgttctgagggtagtagcttttcatgcactgaagaatgagatcctaacaacattgcacatcttggatacattagaaattttaaaagccatgtgtaatttcagaaaacttaataccgtcatgaaagacattttcaacacaaaatttaggcactctatactttggaatagccataaaatattccaacaagagttaatgcactttgtgattacatctactcaaagataattctcaattaaaatctatacttattaaataacattttaaattagagcccattaaattttgataattactgtgaaatatttgcagcattgtgttgtagttaaataatgctgaactacttctattactgactctagt

SEQ ID NO: 557 - DNA, 195 bp, Homo sapiens; identical to SEQ ID NO: 8

SEQ ID NO: 558 - DNA, 195 bp, Homo sapiens; identical to SEQ ID NO: 8

SEQ ID NO: 559 - DNA, 135 bp, Homo sapiens
  misc_feature 37, 82, 101, 120: n = A,T,C or G
acaagctttttttttttttttttttttttttttttgntttttttttttttttttttttttttaggaaaactgaatcaaacanattttattcaactttttanatgaggaaaacaaatgatncaaaataagtcataa

SEQ ID NO: 560 - DNA, 386 bp, Homo sapiens
ctttctcagaagtttgagaaagaactttccaaagtgagggaatatgtccaattaattagtgtgtatgaaaagaaactgttaaacctaactgtccgaattgacatcatggagaaggataccatttcttacactgaactggacttcgagctgatcaaggtagaagtgaaggagatggaaaaactggtcatacagctgaaggagagttttggtggaagctcagaaattgttgaccagctggaggtggagataagaaatatgactctcttggtagagaagcttgagacactagacaaaaacaatgtccttgccattcgccgagaaatcgtggctctgaagaccaagctgaaagagtgtgaggcctctaaagatcaaaacacccctgtcgt

SEQ ID NO: 561 - DNA, 341 bp, Homo sapiens
actggattttaaatctgtatgtatctgtttgatttttttttctaatatttcagttgagctgctgttttcttccatgcaatattgtatactcaattgtgtatagaagaagctggtgagagtgccctcctacataaataagcaattgcagtgttttgcatgcaaaatataaaaaatttaaattgtcctgattctattttgtaaatggagaaacaatcatatctttctaagcggtaatggaggaagactagtgctttgtgcattttgatatatttgagttcattttttccacaatgtcatacttttgacgcagttgggtttctcataagtatcctagttcatgt

SEQ ID NO: 562 - DNA, 347 bp, Homo sapiens
acctctgcatacagatatattataaaacacaagcaatgttatttatgaaactgtgatgcagtcttcaacatcaagaaaaaatgacaactataataaaatttacaacacagtttcacagtctaaatgctatgttcctttaagtattttcatatttttaatcatttattaagagaaaattgtgaaaagttaatttggccttatagagagattcaggatagatgtagcctatagatgtgtcattttaataagttgggatacatgtttagtttttccttatattcctgttcagtgaacagatttttcataattctcacttgttaaagtgctgcaaaaattgcattttcagt

SEQ ID NO: 563 - DNA, 92 bp, Homo sapiens
acaggactaggaagcagataaggaaaatgattatgagggcgtgatcatgaaaggtgataagctcttctatgataggggaagtagcgtcttgt

SEQ ID NO: 564 - DNA, 253 bp, Homo sapiens
  misc_feature 241, 242: n = A,T,C or G
gttgaggggggggcattagtgctgatagctgtgtgtgttagcttgtatatatatttttaaaaatctacctgttcctgacttaaaacaaaaggaaagaaactacctttttataatgcacaactgttgatggtaggctgtatagtttttagtctgtgtagttaatttaatttgcagtttgtgcggcagattgctctgccaagatacttgaacactgtgttttattgtggtaattatgttttgnngattcaaactt

SEQ ID NO: 565 - DNA, 174 bp, Homo sapiens
acctattctttgcagtctcaggaattgttgacatgctcacctatctggtcagccacgttcccttgggggtggacagactggttatggctgtggcagtattcatggaaggtaattttgtggaacggatggagaggaaggagagcctgacaagtcatatttatgaaggatcagagt

SEQ ID NO: 566 - DNA, 195 bp, Homo sapiens
accattggtggccaattgatttgatggtaagggagggatcgttgacctcgtctgttatgtaaaggatgcgtagggatgggagggcgatgaggactaggatgatggcgggcaggatagttcagacggtttctatttcctgagcgcctgagatgttagtattagttagttttgttgtgagtgttaggaaaagggcgt

SEQ ID NO: 567 - DNA, 462 bp, Homo sapiens
  misc_feature 325, 376, 418, 435: n = A,T,C or G
accctcttcaagaatcggatggatgtcgttttgaagggcgacaatcttcctcagtatagaggggtgaacattcggagattgctcaacggtagcatcgtggtcaagaacgatgtcatcctggaggcagactacactttagagtatgaggaactgtttgaaaacctggcagagattgtaaaggccaagattatgaatgaaactagaacaactcttcttgatcctgattcctgcagaaaggccatactgtgctatagtgaagaggacactttcgtggattcatcggtgactccgggctttgactttccaggagcaatgcacccagaangctgccgataggatatacccagtttctactatgtggatgtcttggatgggnaagctggcctgtgtgaaacaagttgcaccaaaaggaacgaantcgcaaaatgaactgtnacctgggcacatgtcagctgcaacgca

SEQ ID NO: 568 - DNA, 412 bp, Homo sapiens
  misc_feature 379: n = A,T,C or G
acctgtgggtttattacctatgggtttatatcctcaaatacgacattctagtcaaagtcttggtaatataaccaatgttttcaaatgtattctgtcatacaaagagcagatttttattgaacttgtgcaataactatattaccatacaatataaatattcatgaatagtttcccaagtctggagcgaccacatagggagaaaatgtaaatgtctcaatttttgttcacaaaagtatattttatcaaattgctgtaagctgtggatagcttaaaagaaaaaaagtttcctgaaatctgggaaacaagacatttaaagaatcagcaaaattttcaaataaaaaaattatgaaaatattatcctcattaagttcaatttagncccatgaaattaattattttctctgcttgatct

SEQ ID NO: 569 - DNA, 401 bp, Homo sapiens
accacctcaagtgcctccccagctcaatctccttgttacagtaaccagtcagatgacggctcagatacagagatggcttctggttctaacagaacaccagttttttcctttttagatctcacttactggaaaagacagaagatatgttgtgggatcatctataaaggccgttttggggaagtcctcattgacacacatctcttcaagccttgctgcagcaataagaaagcagctgctgagaagccagaggagcaggggccagagcctctgcccatctccactcaggagtggtgactgaggtttttatgtagaaggggaacaaaaaaaaaatatctgaattttgaaaaaccacaaagctacaaaactgaccctcttttttttttgagacggagttttgctct

SEQ ID NO: 570 - DNA, 166 bp, Homo sapiens
acatatagacagcaatgttattaggagcattaaattaaaaaactgaacagcctaatttaaatgtggcttgggcctggtagaagtttgaccaaatggaatggaggctgtgagcaatgtgaggattctatttatttatttacgtttgataaaacttactggaactagg

SEQ ID NO: 571 - DNA, 492 bp, Homo sapiens
  misc_feature 345, 394, 402, 453: n = A,T,C or G
actccagcctgggcgacagagcaagactccacctcaaaaaagaaatatttagcaaatattaaaggacaagagggaatatctgtttaaaaaattataatgcacgttagatgaaaagtaataggatgagatggttgttgctgaaatagcacttgctatataaattcaaacattccttttcaaattcagcttctcagaggtttgacttcagatgcttgagcactttcaacattatctttgcctttatccttctttatgcggataaacacaactgctaaaattataccaatcaccagaagggtggtcagcagtataccaactgccatgcccacagtgggtaatcccagntctggtgacctgctggccggaaacaacttccttccacacaactgcagantgtaactngtaaagaaacaatgccttccaagggtggccgacccccatcattgatgcggntcaagacgacatacgccctctcctcaaagtctgtgtgcc

SEQ ID NO: 572 - DNA, 408 bp, Homo sapiens
  misc_feature 9, 12, 259, 262, 383, 385: n = A,T,C or G
acctgtggnttnattacctatgggtttatatcctcaaatacgacattctagtcaaagtcttggtaatataaccaatgttttcaaatgtattctgtcatacaaagagcagatttttattgaacttgcgcaataactatattaccatacaatataaatattcatgaatagtttcccaagtctggagcgaccacatagggagaaaatgtaaatgtctcaatttttgttcacaaaagtatattttatcaaattgctgtaagcntgnggatagccttaaaagaaaaaaagttttcctgaaatctgggaaacaagacattttaaagaatcagcaaaaattttcaaataaaaaaatttatgaaaattattatcctcattagttcatttantnccatgaaatttaattatttttct

SEQ ID NO: 573 - DNA, 195 bp, Homo sapiens; identical to SEQ ID NO: 8

SEQ ID NO: 574 - DNA, 322 bp, Homo sapiens
gcccgcggagtatacaccatgagcaaagctcaccctcccgagttgaaaaaatttatggacaagaagttatcattgaaattaaatggtggcagacatgtccaaggaatattgcggggatttgatccctttatgaaccttgtgatagatgaatgtgtggagatggcgactagtggacaacagaacaatattggaatggtggtaatacgaggaaatagtatcatcatgttagaagccttggaacgagtataaataatggctgttcagcagagaaacccatgtcctctctccatagggcctgtttttactatgatgtaaaaattag

SEQ ID NO: 575 - DNA, 358 bp, Homo sapiens
acaaaaaatggcaggaatagaaattacagaggaaatgacaatggagcaactagaggctatgactggtggagagcagctaaaagctgagggtggttattttggtcagatcagaaacactaaaaaatcctctcagagattaaaggatgctctattggaccatgatcttgcccttcctctctgtctgcttatggctcagcagagaaatggggtaatctttcaggaaggtggagagaaacatttgaaacttgtgggaaagctctatgaccagtgtcatgatgccctggtgcagtttggtgggtttttagcatctaatctgagcacagaagattatataaagcgagtgccttcaattgatgtt

SEQ ID NO: 576 - DNA, 111 bp, Homo sapiens
gcgcaagtaggtctacaagacgctacttcccctatcatagaagagcctatcacctttcatgatcacgccctcataatcattttccttatctgcttcctagtcctgtacctg

SEQ ID NO: 577 - DNA, 381 bp, Homo sapiens
  misc_feature 29, 108, 140, 156, 170, 192, 231, 255, 271, 273: n = A,T,C or G
aaccagaatagcatactgtgataatttantggacttagttatttcaaaagatattattccacttccctgctaaatgaaattaatcatcacctttgactttcaagaggngaaaatagcgtgtaataaagcatatcttttantcatcaggcctactgngaaaagcaaatacngactggatatattatatactanctggtattttttgcttcaattggattttatctcttttgntaaaaaaacatgatttcatcttgnaactgaactgcacatntnatatcagagaaaatcttctaatggcatgacttgtaaaatctctaccccaacaaattagtttgataatctaggagttacctttatctgaaacataatgagttatgttct

SEQ ID NO: 578 - DNA, 415 bp, Homo sapiens
acaaagcagcaactgcaatactcaaggttaaaacattagaaaagcatttgtgtgacaggtatattacagtattatcaaaatattacattttcagacttacttagcagataatcatccaccagagcttaaatctttaaattatttccatagtcttaaaaaatatgtaatgtcagaatgcatataaaaagaatgtaaaaggaaacctaaaatacaaatggaataatgtaacaaataaatatttgatttcagtaactgttaataatcagctcaacaccaccattctctctaaactcaatttaattcttataggaataatgaactgtcaaatgccatggcataattatttatttccaagctatcatcaatgattagaaactaaaaaaaatttggcataaaaaaaatcacaattcagcat

SEQ ID NO: 579 - DNA, 556 bp, Homo sapiens
  misc_feature 486: n = A,T,C or G
acaatcttaaaaatttgctgattcatagtttgtaaaacaaaaaccttacaaaactcatcaaaactcgcaaactgatcagaaaagtttctcggaagactagaaaaaatactttattgtcttaatcatgcattacacaaacaaaatctttagttacaccataaaattaagcacatctaaaaaaataaaacagggataactagtcaaaacacagcagatttctgtatcctgattcaactatttttgtatcctatttgtaatgcaaataaaactttactccaaatatttttaaacaagttagttttgtttggaatcatggtaaaccaagatatatatcttagggggaaaccaccttggtttgtaatttaaactataaaatactccatttttagtctattttagactattcaaagagttccaaaatagatatacaggttccttttaggcacattaataaaaggatataaagaccaacaaaaaagtggaatnaataataggccattaagcaaagatggataatccttgataaataaacttgtaaatacagtaagatgtacct

SEQ ID NO: 580 - DNA, 242 bp, Homo sapiens
  misc_feature 9: n = A,T,C or G
accaagcanggaatcgcagggaaatcattcgttttcggggcatatggaacaggtagacagtgtcaaggacttggtccttgggcacctggcaaggataaaagagggggagacttaaggtaggggacctataattccccattctctaaaggcacaatgtataccctgaggggcccactctcacaagaagactcttaaaagagccctgccaaaccatcaggttgatgacccggaagtccttctgc

SEQ ID NO: 581 - DNA, 352 bp, Homo sapiens
ttttattattttacagttgttcaggaaacttcccaggatgttgtaaccaagatttaatcaccacagtagatttagagcagatcagtcagcccacttgtcttctctcttctttagggagaggctaggcagtgaacacatcacgtatgcaatgagaaaataaccaactggtaggatgggggaggggaggggaggcagggaataggcacaaatggaattctatcctggctgtccttctcaggtctatctatatttaattttgtcttctctatattctccttccattgccacagagggcagagacaatggggctgagaaactgtaataactgtcactaacagcaaagtagcttagt

SEQ ID NO: 582 - DNA, 432 bp, Homo sapiens
  misc_feature 12: n = A,T,C or G
acctagactcanatacagagaaggaactgcaagcactttatgcactacaagcatcgatagtaaaacttgatcaacctgccaatttgctgcggatgttttttgattgtctatatgacgaggaggtgatctccgaggatgccttctacaaatgggagagcagcaaggaccctgcagagcagaatgggaagggcgtggctctgaaatccgtcacggcattcttcacgtggctgcgggaagcagaagaggagtctgaggataactaaaacttcaaatacacaaaatgaaacaaaagaaacaatttaagtatttttttaaaaagtttcacgtcttcgccaatcacagtgcagcaaggccaattctcgcagaaacccccacgtgtgcacgagtgggagaggggaaagagaaaaaaaggtgatcatggaggaaaaaggt

SEQ ID NO: 583 - DNA, 307 bp, Homo sapiens
  misc_feature 25, 70, 71: n = A,T,C or G
cggcctgggtgctggcgaagcggangccggagttaatacacgaggaactcatgcaaaggaggggactttnngaaatccaaacttagagtgccttgtatttagaatccggaaggaaaaggaaatgaaatgtgaagaaactcatgcaccaaactcgaactggtaagaagactgttagaatgccctcggtaacacagaggctgagagatcctgacataaatccttgtttgtcggaatctgatgcttccaccagatgtctggatgaaaataactatgacagggaaaggtgttccacttactttcttgaggt

SEQ ID NO: 584 - DNA, 171 bp, Homo sapiens
  misc_feature 59, 152, 158: n = A,T,C or G
cttttttttttttttttttttttttttgatttttttttttttttttttttttttttaanacaaatttaaaacaaacttaactttatttcctcactttcacttaaaacttgattttataaaacacatgaaaaaacatttttaaaagttctgtntcacanaacattaaacagt

SEQ ID NO: 585 - DNA, 414 bp, Homo sapiens
  misc_feature 347: n = A,T,C or G
acaccgactacggcggactaatcttcaactcctacatacttcccccattattcctagaaccattggtggccaattgatttgatggtaagggagggatcgttgacctcgtctgttatgtaaaggatgcgtagggatgggagggcgatgaggactaggatgatggcaggcaggatagttcagacggtttctatttcctgagcgtctgagatgttagtattagttagttttgttgtgagtgttaggaaaagggcatacaggactaggaagcagataaggaaaatgattatgagggcgtgatcatgaaaggtgataagctcttctatgataggggaagtagcgtcttgtanacctacttgcgctgcatgtgccattaagatatataggatttagcctataaatttaactttgacaaag

SEQ ID NO: 586 - DNA, 308 bp, Homo sapiens
  misc_feature 15, 16, 48, 159, 160, 163, 181, 182, 191, 201, 202, 209,228, 232, 251: n = A,T,C or G
acaattgctctattnngtcactacgaaaaggctggagcttaatgcatnctgggagactcacacatttgcatgaaggacttcctgttaaaaatggaacaagatacattgcagtgtcatttatagatccctaagttatttacttttcattgaattgaaatnnatnttgggtgaatgactggcnngaacacgtntttgaagttnnggctganaagatgagaggaatatttnaatnacatcaacagaacaacttnacttttgggccaaacatttgaaaaacttttttataaaaaattgtttgatattttctt

SEQ ID NO: 587 - DNA, 140 bp, Homo sapiens
  misc_feature 71, 72, 73, 109, 110, 122: n = A,T,C or G
accattggtggccaattgatttgatggtaagggagggatcgttgacctcgtctgttatgtaaaggatgcgnnnggatgggagggcgatgaggactaggatgatggcggnnaggatagttcanacggtttctatttcctga

SEQ ID NO: 588 - DNA, 236 bp, Homo sapiens
accaactagaagtgggtcatagatagattaccagggatgcagtggtgtttaggcaggataggtctttactggccctgactgctgttaataattggcagcagtgctccccagatcccagaaggtccctgctggagtgtttccagtgcacctgtagggaaccaactagacttctctcctggttagtccagctctttactctaaaccctttctgtccaaaatgagtcattttcagttgt

SEQ ID NO: 589 - DNA, 336 bp, Homo sapiens
acaccacctccaaaaataaaaaatggaaaacacacctttagtgaagtagaagtatttgagtatcttgatgcagtaacttatagttgtgatcctgcacctggaccagatccattttcacttattggagagagcacgatttattgtggtgacaattcagtgtggagtcgtgctgctccagagtgtaaagtggtcaaatgtcgatttccagtagtcgaaaatggaaaacagatatcaggatttggaaaaaaattttactacaaagcaacagttatgtttgaatgcgataagggtttttacctcgatggcagcgacacaattgtctgtgacagtaacagt

SEQ ID NO: 590 - DNA, 403 bp, Homo sapiens
acctgtgggtttattacctatgggtttatatcctcaaatacgacattctagtcaaagtcttggtaatataaccaatgttttcaaatgtattctgtcatacaaagagcagatttttattgaacttgtgcaataactatattaccatacaatataaatattcatgaatagtttcccaagtctggagcgaccacatagggagaaaatgtaaatgtctcaatttttgttcacaaaagtatattttatcaaattgctgtaagctgtggatagcttaaaagaaaaaaagtttcctgaaatctgggaaacaagacatttaaagaatcagcaaaatttcaaataaaaaattatgaaaaatattatcctcattagttcatttagtcccatgaaattaattattttctctgct

SEQ ID NO: 591 - DNA, 447 bp, Homo sapiens
acacctttgactacagctgcagaagtgttcctttagacaaagttgtgacccattttactctggataagggcagaaacggttcacattccattatttgtaaagttacctgctgttagctttcattatttttgctacactcattttatttgtatttaaatgttttaggcaacctaagaacaaatgtaaaagtaaagatgcaggaaaaatgaattgcttggtattcattacttcatgtatatcaagcacagcagtaaaacaaaaacccatgtatttaacttttttttaggattttgcttttgtgattttttttttttgatacttgcctaacatgcatgtgctgtaaaaatagttaacagggaaataacttgagatgatggctagctttgtttaatgtcttatgaaatttttcatgaacaatccaagcataattgttaagaacacgtgtat

SEQ ID NO: 592 - DNA, 453 bp, Homo sapiens
  misc_feature 9, 38, 39, 412, 413: n = A,T,C or G
acaaagcancaactgcaatactcaaggttaaaacattnnaaaagcatttgtgtgacaggtatattacagtattatcaaaatattacattttcagacttacttagcagataatcatccaccagagcttaaatctttaaattatttccatagtcttaaaaaatatgtaatgtcagaatgcatataaaaagaatgtaaaaggaaacctaaaatacaaatggaataatgtaacaaataaatatttgatttcagtaactgttaataatcagctcaacaccaccattctctctaaactcaatttaattcttataggaataatgaactgtcaaatgccatggcataattatttattttccaagctatcatcaatgattagaactaaaaaaaattttggcataaaaaaaatcacaattcnncataaataaagctattttttagcttcaacactagctagca

SEQ ID NO: 593 - DNA, 323 bp, Homo sapiens
acagcattctggaataaagcaagagtgttcattcacacacacagtagcttcaaaactgttcgatctgtttgttcccatgtagttttctaaagatggaaaaaaaggactttggtcatcaagactactgtggccatattagattactggaacatctaagcatcagtgtgtgaccatgcgaacaaaagacttcggggagtgtctatttttaaaaaggtttatgtgtgtcgaggcagttgtaaaagatttactgcagaatcaagcccacttttaggcttaggaccaggttctaactatctaaaaatattgactgataacaaaaagtg

SEQ ID NO: 594 - DNA, 416 bp, Homo sapiens
actctaggtctgttgattacttaaagtagctaaaatggaaatacattgctggaaaagaaagttaattccttagccttaataaaacctttttatatttactgacctttaatatgaaatcagatacctttccttagctggtttaaatctaggtcctcttttggactattgtttcaggttgaatttccctgaaagcagacactctgaaatggaaatctgagcacagcaaatttactagggaggcctcttgggaccaatgccatgtaaaggaagaaagccagatttccatgggagaagttggactgtgatacagtttcaataacccacacggagagctctgaaagctgggatggtccctcagagttgtctcaagttggggttgagaggagctggacgtttatatccccaatcattagatg

SEQ ID NO: 595 - DNA, 357 bp, Homo sapiens
acacattgaaattggacccgatggcagagttaccggtgaggcagatgttgaatttgctactcatgaagatgctgtggcagctatggcaaaagacaaagctaatatgcaacacagatatgtggagctcttcttaaattctactgcaggaacaagtgggggtgcttacgatcacagctatgtagaactttttttgaattctacagcaggggcaagtggtggcgcttatggtagccaaatgatgggagggatgggcttatccaaccagtctagttatggaggtcctgctagccagcagctgagtggtggttatggaggtggttatggtggttcagagcagtatgagtggatatgaccaag

SEQ ID NO: 596 - DNA, 462 bp, Homo sapiens
  misc_feature 217, 418: n = A,T,C or G
acacttttgttacagttacatatatgaatagttagcagaggagaaactcctccgttgttcctacaccaagggaaaaaatgtaaggactgtatagctcatgaataatattaacatttttctatcacaaaatattgataaaattggaattgtatcaattcatgttatggagcttaacattttagccgaaatattaagataatataaataaggcttttancttcatatcaagacctatttgaacacttctagaaaagaacattaaaagttttttcctcatttatggtttgatttagtgtagttgcctcaactgttcttaatggtgtcttagtataatgcataattatttagaatataattataaggcatttacagaatttttatgtggatacttgcaaagatattttcagtccaaaacttnaaattacacacccaaatatgttttgttgccttaatctatacttg

SEQ ID NO: 597 - DNA, 329 bp, Homo sapiens
  misc_feature 12, 40, 289, 290, 291: n = A,T,C or G
acagacctaacnaactgttagattctccaccatcacttanggtttgcccagaagcaacaccagagaattacagacaacgcgcttttgctgaactgtccattttggtggttgtgtttttcagtcaaatataagcaggatgggcgatagagatatatttatatatagatacatattctatatatctaatgcctaaatatgggtattaaagggaaaatttttaaagtctgattaaatccaatatgacatgaaattaaatatatggattagtaaggaaaaatgttaaaaagtnnngaggataccaagaagattaaactggactagccttattt

SEQ ID NO: 598 - DNA, 288 bp, Homo sapiens
acaattacccaccactggatttgactcagagaggacccccagagggtgtctccatcttccctatttattttcagcccttgagggcttcattgtagatcaaagccaaggcccccaggaaggtgacatactcctggaagttcacctcctggtccttgttccggtccaagtcttccatcagccttgcaatttcagcatcctgcagcttcgagccaatggtgagctccttctggatcagctccttcagctccttcttgctcagggtgtgcttgtcaccctccctgccggagt

SEQ ID NO: 599 - DNA, 411 bp, Homo sapiens
  misc_feature 221, 227: n = A,T,C or G
acagtgagtccctggcccggtatggcaagagcccatatttatacccgctctacggcttgggcgagctgccccagggttttgcaagattgagtgccatctatggggggacatatatgctgaacaaacctgtggatgacatcatcatggagaacggcaaggtggtgggcgtgaagtctgagggagaggtggcccgccgcaagcagctgatctgtgaccccagntacatnccggaccgtgtgcggaaggctggccaggttatccgcatcatctgtatccttagccaccccatcaagaacaccaacgacgccaactcctgccaaataatcatcccccagaaccaggtcaacaggaagtcagacatctacgtgtgcatgatctcctatgcacacaacgtggcggcccagggcaagt

SEQ ID NO: 600 - DNA, 532 bp, Homo sapiens
accatatgggagagagaaagaacctagaaatgggtgtatacatgccattttggtccttctgtgactccttagctatgtgacagttggctaagaagaggggagaccttggagaaagaaactgctgggatacagaaagcagaagagatcatcagggactgaaaacttcctggaaagctactagagttcagatccagccaaatggggaaatgttggcaaacaactgagaaactcagttggaactctaaaaattctcttaggagagatgcagtatcccaggagtgaggcatatgttctaagaggaaaataaaatataattaccataacacagcttaaaactaggtcttgagagcagcaagatgatctgcaagtaattacaaattctgcccagaaaaaaaattcaaaattcttgagtagttctatatcatattatccataaattcagcatactttaaaaaaaataccaaatatacaaaaaagcaagtaaaacagactgataagaaataaatcagttattaaaaacaaactcatagat

SEQ ID NO: 601 - DNA, 211 bp, Homo sapiens
acaggtgccgcgctgtggaagcaactcgcgtgtagaaccagttctcatcgtagggagcaagctctttgtgcttggccagcttgacggtatccacccattcggggactttcagcttcccggactttttgaggaaggctgccagagctctgacgaactcctgctggttcacgtcttttacagtaactccaggcatcgtgcggcctccgcgctg

SEQ ID NO: 602 - DNA, 546 bp, Homo sapiens
acatggacattctgcaaacccagctgtcacatttttcttgcaactccttttgcaaaagcagactaaaatgttttaaaatgtgaaaaaacattattttttcaaagcaagaaaataatttactgccctcttacataatgtatttataaagtttttccagataaactaatcaaataaattagaataatgtgacaacattacaaatttaatttgttagctgcattccttctgatgttaccacgatagaatgttactgatgattcagggctatttctgaagtctgtatgttgctgctgtccccagtgatggtggacttatctttgccttacctgatcacaaattatgttggggaaaataaagatttaatatttctttaaatagaaaaagaatttggttttgctcgtttaagagcaatgagaaaatgatggaatgttgactgtgtttggcacacaggacacggaccttcatggaagtccttgctctgcgtggcatctgtcagcttttcacctttcattcttattcttcacttttgctgctgagcctagctgt

SEQ ID NO: 603 - DNA, 496 bp, Homo sapiens
accctcttcaagaatcggatggatgtcgttttgaagggcgacaatcttcctcagtatagaggggtgaacattcggagattgctcaacggtagcatcgtggtcaagaacgatgtcatcctggaggcagactacactttagagtatgaggaactgtttgaaaacctggcagagattgtaaaggccaagattatgaatgaaactagaacaactcttcttgatcctgattcctgcagaaaggccatactgtgctatagtgaagaggacactttcgtggattcatcggtgactccgggctttgacttccaggagcaatgcacccagaaggctgccgaaggatatacccagttctactatgtggatgtcttggacgggaagctggcctgtgtgaacaagtgcaccaaaggaacgaagtcgcaaatgaactgtaacctgggcacatgtcagctgcaacgcagtggcccccgctgcctgtgcccaaatacgaacacacactggt

SEQ ID NO: 604 - DNA, 587 bp, Homo sapiens
  misc_feature 225: n = A,T,C or G
acaacatgacttaaaacttttttttttctattaaaacttaaaggggaacaaaacttgaaaaagccctgttcttcagaaggtgagtgggttgagggaggcagtaatatgaagtgactgctgtgtattttaactaccagattttttatatttgccactgttaaatagttggaaaggggaaattctgattaagcgaaagtggtatcatcctaggtaagcttatttcanaacaagtctaatatttcagattctttcttttcgactttatactctgagttattacttactgtaagtggtgtatatgaaacctccatgcattttccagtatggatctgctaatatgcacagtaaatccatgtctttgtttgtttttctattaaaaagcaatcaagaaagataatgtgaaaaagaaaggaatttagaggtagggaaaagatgaatgtcagacatttgaagaactatagtaaaatgataaacactaaatatacttgagaaaactttcttaatatgccaatgaggtaggcctgatctttgaaatagtgaataggaatacaatgcatttcctcagtgatcactgattagaatgagtt

SEQ ID NO: 605 - DNA, 411 bp, Homo sapiens
acggtagaactgctattattcatcctatgtgggtaattgaggagtatgctaagattttgcgtagctgggtttggtttaatccacctcaactgcctgctatgatggataagattgagagagtgaggagaaggcttacgtttagtgagggagagatttggtatatgattgagatgggggctagtttttgtcatgtgagaagaagcaggccggatgtcagaggggtgccttgggtaacctctgggactcagaagtgaaagggggctattcctagttttattgctatagccattatgattattaatgatgagtattgattggtagtattggttatggttcattgtccggagagtatattgttgaagaggatagctattagaaggattatggatgcggttgcttgcgtgaggaagt

SEQ ID NO: 606 - DNA, 468 bp, Homo sapiens
acctggagtataagaagagggtgcccacgggcctgcctttcataaagggggtcaaggtggacctgtgacgggcagtggccccggtgaccttggggcctccgaccctgtgcagcctgggacaaaactgtttccggttggccgctgccacatggattttcttaatcgttttatgtcattagtcactcttctggaatgtcactcaagaccaagcggtcagaaggcctgaggacccaaggccccactggagcagtctgtccttatgccgaatcaaggcggaacatgggtgaaagacgagtaaggggcaaatcacagcaatattccacagcgccctccagagttacctggggaggaccgaggccacacgccactgcccccgaggccagagtgtaagtaaaggataaccaggactcgctgggagagatggactctgtcctcagcaacactccacagcagaaaggggtagcaggt

SEQ ID NO: 607 - DNA, 360 bp, Homo sapiens
acttggatgaggaactgatggtcctaagctcaaacagcatgtctctgaccacacgggagccctctcttgccacctgggaagctacctggagtgaagggtccaagtcttcagacagagaaggaacccgagcaggagaagaggagaggagacagccacaagaggaagttgttcatgaggaccaaggaaagaagccgcaggatcagcttgttattgagagagagaggaaatgggagcaacagcttcaggaagagcaagagcaaaagcggcttcaggctgaggctgaggagcagaagcgtcctgcggaggagcagaagcgccaggcagagatagagcgggaaacatcagtcagaatataccagt

SEQ ID NO: 608 - DNA, 265 bp, Homo sapiens
actaagagttctagttaaaatctacatgaacttggagaaacctgatttcatcaatgtttgtcagtgcttaattttcttagatgatcctcaggctgtgagtgatatcttagagaaactggtaaaggaagacaacctcctgatggcatatcagatttgttttgatttgtatgaaagtgctagccagcagtttttgtcatctgtaatccagaatcttcgaactgttggcacccctattgcttctgtgcctggatccactaatacgggt

SEQ ID NO: 609 - DNA, 382 bp, Homo sapiens
  misc_feature 96, 233, 269, 286, 372: n = A,T,C or G
acctagtaaaattgatgaaaagagactgactcctagacacatcttggtgaaattttggaattctagtgataaagagaaaataataagggcttctanagagagaagagaaattacctaccaaggaacaagaatcaggttgacagcagacttatcactggacacactggatgctagaagtaaatggagcaatgtcttcaaagttctgctggaaaaagggctttaaatcctagaantcctatatccagcccaaaaatggcattttgattttnagggggtaaaaacaaanggtattttcttagtatttgagaatttagagattatgttttgcatatgcccaccttgagagaattactggggaataatataccttancactctaggg

SEQ ID NO: 610 - DNA, 123 bp, Homo sapiens
actgaaagactggcctcacttaaactgagccaggagagctgcagatttattaatgggtgtgttagtgtgcagtgccttgcaggaatttaaactctctacccttaaagaaggaaatgtatttgt

SEQ ID NO: 611 - DNA, 428 bp, Homo sapiens
  misc_feature 412: n = A,T,C or G
accaggtcacagcacacctgcggggacgcagttaacatcgaaggtcatagggcaagatggactgtgctcaggaagcttccttgggcagaagtgtggcagaatgggctggagccagcgaggccagcagcgaggaaagccagggagaaggctcaggtattatattccataataaatagggatcgcatgtgaaaaaaggtaatgctaacatcagtgtcaaagtgagaggtgatcaggaaaggaagtggagttgtggtgatgacagtaaggtgaggatgaccgctagagacaccacagaggatactacagagatactacagaaccccacaactaagagatcatgggagcgggggcagggaggaggagctgtgggacagaacaaaggaacggcagacttggggggagggggcgaaangatgggggaggatgca

SEQ ID NO: 612 - DNA, 286 bp, Homo sapiens
  misc_feature 182: n = A,T,C or G
ttttttttttttttttggctctagagggggtgctatagggtaaatacgggccctatttcaaagatttttaggggaattaattctaggacgatgggcatgaaactgtggtttgctccacagatttcagagcattgaccgtagtatacccccggtcgtgtagcggtgaaagtggtttggtttanacgtccgggaattgcatctgtttttaagcctaatgtggggacagctcatgagtgcaagacgtcttgtgatgtaattattatacgaatgggggcttcaatcggga

SEQ ID NO: 613 - DNA, 324 bp, Homo sapiens
actccatctcctgtggggttttcagctggcactcagcacatttgtagaatgacccaggagggctccatggcaactgtgccccgagactccaggcccagccgggtcccgatggcgagagcgttgtggctcagtgaagcactggcacagaaaggctggactcgaggaatcgaggggtgaagatggagtcggctgacattttttgccttaaaaatacattaggagtcataagcgtgatgacacatggagtgtagcttcttgcaccactggatcaacagtcatcaatttcatgactcggataaggtccccaggagcctggcagaatgt

SEQ ID NO: 614 - DNA, 417 bp, Homo sapiens
accaggaagaaacatattgccgagtggatgccgccgcgcagcgtgtttgcttgaggcagaagcttcagcatctgctgggataactggaggaagaaatatgaagccttagcggctttacccgggaagcgagtttcgagatggcggctcagcggatccgagcggccaactccaatggcctccctcgctgcaagtcggaggggaccctgattgacctgagcgaagggttttcagagacgagctttaatgacatcaaagtgccttctcccagtgccttgctcgtagacaaccccacacctttcggaaatgcaaaggaagtgattgcgatcaaggactattgccccaccaacttcaccacactgaagttctccaagggcgaccatctctacgtcttggacacatctggcggtgagtggtggt

SEQ ID NO: 615 - DNA, 591 bp, Homo sapiens
  misc_feature 9, 10, 571: n = A,T,C or G
accgtttannatttcatccacatgcccagataatttttttttaatattttgtaaagatggggattccctatattgtccagaatggtcttgaactcctggctttatgcagtctttccacctcagcctcccaaagttctgggttacaggtgtgagccactgcgccgggccaattttggtttttcatggaggacttttagcaggtctcaaaagttttcttctaatagttttcttggtgttctatcattcgtaggtgttgaatttaccaaactttttctatttcaattattacatttttactttgttcaagtaatattgtatcatattaaatgaacattgcattgtgaaaataccctgcttagtcatggtatgtaatcatccttatacctttttgtattctttttttaaatatttctgagaatttctgtgtctaaatttaaataggatgttgttttgtaatcatcttgtgattcttttgtctcctttgggtattattggctaatagatgaattaagaaatgttacctcttctactgcttgaagtttttgtgagaaattgatgttttttcattaangtgttgatgaaatgtacctc

SEQ ID NO: 616 - DNA, 144 bp, Homo sapiens
  misc_feature 81: n = A,T,C or G
tacctatgggtttatatcctcaaatacgacattctagtcaaagtcttggtaatataaccaatgttttcaaatgtattctgntatacaaagagcagatttttattgaacttgtgcaataactatattaccatacaatataaatat

SEQ ID NO: 617 - DNA, 307 bp, Homo sapiens
acttttacctgtagactatttttactaaggtgctttataatgtgttttaaagcattgcatttacaaaacaaggaaaatgctgtaaatattgcatattttatgtatttggaccaaaaggttacaagtaattagacaaaagtggttttgcaccaattttatgtcaagtaaaaccatcagacctactgttcttgtatttctcatttaactttactgttaagacatcactgaaatgaacttcagtaagctttcaattttgatacacagttcattattcataacttgaggcagtaattacagtggaatgagt

SEQ ID NO: 618 - DNA, 550 bp, Homo sapiens
acacggggcccagactcttgcctggtgccacgtcctccctccagcctgtaatcagaagcccttgtaaaccctcccttgcagtgagggctgaaaactccgatctgcctttgttccatgacaaaggagagattatcacgtgccctactggactgtgcatttcgtggcttgaaaaatcagtggtgaatgatgccactcagacgctgggacactgggagaaccttggttcttggccacagcactgagcttggcgaccagtgaggctgctgctggtgaaacttaacaccataacctctcgttgtcttttgtgaaatcgttccgacttcatggtgttttcttgaagtcattctgccttaaaggaaaaactcattttctttttcaatttaacacaaatattgtggccattttttagaagagttactatttcaaatttcaagggagaagataagactgcatttcccccttaaggaaaaggctaagttaccaaggctgtattaaattgagtatgtgaaagttacctagcaaatccaggatagacagtgacccaatgaat

SEQ ID NO: 619 - DNA, 355 bp, Homo sapiens
acataattgattaaaatctcttgattataaatgtttggaaaggttctaaggggacctacagacagacatacatagacatttcaaaattaatagcttttgattagtataatatttcttaatttggataataaaaattgtagctttttattaagccaggaaacatgaagcataatttgtttaaaattctctttggtcattgagggaccaaaaaaggacgtaaaatttacagtcaatctatgagggtttttttccctccataagtttaactttaaaactgtatttaaggaatcaaatcttacaaaatcctggaagattttggtaatgatgttgataatttcagggaaattaatcaagt

SEQ ID NO: 620 - DNA, 484 bp, Homo sapiens
  misc_feature 458: n = A,T,C or G
accttggaacccagtttattcttgtgctaagcagaactgtaaaatagttaaaatgtcttatcaagtaattcgccgattacaaagacaccatttgttttttatttcattctttgttttaactcatgtggtagtgatatttaatactttctgatcaaacaggttcaaagtaaaacgttaaatttcacatttcttttaaagaactcttaaagtgtaacagttacgccatacttcataagtggtaaagaaaggtataaaatttggaaacattttgttgggcatagtagtgattgggtgaaaaggataaattatatcaaaatgagaatgtgctgtaattggaagtagggagctaaaggatgtttctttcagtttagtagaactggaacgttttactattaaacatggcttttataaatgcatggtccaataattttattcactgttagtatttaattcactgncagcttattaatgttttctgtacctc

SEQ ID NO: 621 - DNA, 447 bp, Homo sapiens
acacttgtttatggaactttctgtggccacctacgaaagacaagttaacaaactgtcatggaggctgttgttgcccagccagggccgctgcattttgacaacatttccaccctggccactcagcacatttcatggaggtcatgtcttttcactgatacttttttgatagtttttatataacaaaatccttattctatttataacttaagatgataaggcactataaattaatgacctaaaataatatatttgtctgttatcttttgctatttctacttcactttaatttttagctgtaaaattggtaaatggattcttacaactatctctttccatttcttactatttggttttcaaatttcatttaaatgtcagaatttccttttttaggaacaatgtgtatttcattgcactatttaaaaataaactcaaatttgcatgccaaaa

SEQ ID NO: 622 - DNA, 554 bp, Homo sapiens
  misc_feature 487: n = A,T,C or G
actctgaggcttgtaggagggtaaaatagagacccagtaaaattgtaataagcagtgcttgaattatttggtttcggttgttttctattagactatggtgagctcaggtgattgatactcctgatgcgagtaatacggatgtgtttaggagtgggacttctaggggatttagcggggtgatgcctgttgggggccagtgccctcctagttggggggtaggggctaggctggagtggtaaaaggctcagaaaaatcctgcgaagaaaaaaacttctgaggtaataaataggattatcccgtatcgaaggcctttttggacaggtggtgtgtggtggccttggtatgtgctttctcgtgttacatcgcgccatcattggtatatggttagtgtgttggttagcaggcctagtatgaggagcgttatggagtggaagtgaaatcacatggctaggccggaggtaataaataggattatcccgtatcgaangcctttttggacaggtggtgtgtggtggccttggtatgtgctttctcgtgttacatcgcgccatcat

SEQ ID NO: 623 - DNA, 305 bp, Homo sapiens
acaacaccgggaatattgccagagttaacctgaccaccaacacgattgctgtgactcaaactctccctaatgctgcctataataaccgcttttcatatgctaatgttgcttggcaagatattgactttgctgtggatgagaatggattgtgggttatttattcaactgaagccagcactggtaacatggtgattagtaaactcaatgacaccacacttcaggtgctaaacacttggtataccaagcagtataaaccatctgcttctaacgccttcatggtatgtggggttctgtatgccacccgt

SEQ ID NO: 624 - DNA, 544 bp, Homo sapiens
acaaacccaggcctgggcctaggaaagggcagaagaaaggcaaagggtcccttggagcaggaacccatccctctctgcttatacccagcacccctcatcccaggttcctttcttcaacctccgcctgcctctgggaacacagagcaccaagaactaacaaaccgggaccctccagggccacagcgtggggcagagtccaggcttctgtctccccgcagtgggagatctggggagctcagtgaacctcctcaccctcctgccagtatgaagttgggaagcgccttctctgtcccccagaacagaacaaactcttgttctctgtggttggggaaaaggtgtggggggcttggacctaggaagaagctgagctgaattcctccagggcccaggtgaaacccccaggggagtttctgagactctagacttgccatttctccacttttccttcccaatgactccggtgagcagctcagagtctgggctagggcaactggtaggacagtggggatctgccccagagacatctgtgggtttcagatacctc

SEQ ID NO: 625 - DNA, 619 bp, Homo sapiens
acttatatttaatttgatttaatggttactgcccagatattgagaaatggttcaaatattgagtgtgtttcaatatattatctggcttatttcagcatgagtaatatgagcaaaataagttaaaacctgcgtctgatcaattttcctcatgactagaactaaaacagtaaatttggacaatattaagcctcaaataatcatctccaaactccttctaacactttttaaatcagattggaagacatggacaaatcaggttcatgtgttgcatctttatgtcctttgccaatatccaagatcatcacatatggtagatattcacatggagtttcaaattcagaatagattaccattaccttcctgcccttacacatcctactccttatttaaaagttctatttgtgacttttcatttcctgaaagtttaaaaatacaatttgagaatgtttataatacattctctcctgtcttttcacggttacgtctgttattgctgaaatacaccacattttctttgttctggtcaaggttaactcaatatctgtgtgaaagagaactactaacaacgttacaatagaggctagatttgaaaaaaaaatctatagatctaattgataca

SEQ ID NO: 626 - DNA, 195 bp, Homo sapiens
accattggtggccaattgatttgatggtaagggagggatcgttgacctcgtctgttatgtaaaggatgcgtagggatgggagggcgatgaggactaggatgatggcgggcaggatagttcagacggtttctatttcctgagcgtccgagatgttagtattagttagttttgttgtgagtgttaggaaaagggcgt

SEQ ID NO: 627 - DNA, 197 bp, Homo sapiens
  misc_feature 122, 173, 174, 176, 185, 186: n = A,T,C or G
accattggtggccaattgatttgatggtaagggagggatcgctgacctcgtctgttatgtaaaggatgcgtagggatgggagggcgatgaggactaggatgatggcgggcaggatagttcanacggtttctatttcctgagcgtctgagatgttagtattagttagttttgtnngngagtgttanngaaaagggcgt

SEQ ID NO: 628 - DNA, 208 bp, Homo sapiens
acttttgttttgttttaaattaagagattcccaaatgcctttttccccctcatcttgaaatgagatgagtttttatgtgtaagcaatatttatttaactattctataaaattattgagtgcctactgaggcctttaagcaccgctaacattcctttccatcattcttttaaatgacataaaataattgtgcaatgttcctgatgatgt

SEQ ID NO: 629 - DNA, 207 bp, Homo sapiens
actaagtgaagaagtcagaggacagaggaatttctctttctaggagattttcattttgtgtgactcccatggggaggaacagactggcaggaagtacaccggggttaacactggttgacttgaataggattattcgatttttaaaaatacttttccatgttttctgagtgctctatgataaatcagttgcatctgtgataatacagt

SEQ ID NO: 630 - DNA, 442 bp, Homo sapiens
accatcacacaggaggagggagctaatccagtaacatacattcaaagattaaattgcagatatgcacagtgtatttggcactgttcattaatattataacaccttcctctcaaagacaggcattcttaagcgttagtcacgatataccagaatttgctattcacattaaaaccaccttttaaactttataacagtaaccgattattatagttttaagaaacaaaacacaatgagaactgggaatggaattcaaatcctccaacttcttgctatgctccaagctgccatccataaaacaggtttaattcggtaatttttccattgtggggagtgtcaacaagaaacaatttaaagacagtattttccaatacaaataaagacacatacttttgtttaaaattaccagttcttcttgggagtgcaaagggagccttgatgatgt

SEQ ID NO: 631 - DNA, 516 bp, Homo sapiens
  misc_feature 401, 504: n = A,T,C or G
accacttaattactggcactgagtatcactgaatttcttagttttctagtggggaaacattattgagaagccctcccttattttaagtaagttgattaaatcttatgtgagttgccagttgtaatttttcaaaggaaaaattttgatggggtggaggaatgaattgccagataatctttctggaattccgagagaattccaaagagggttttttttttttttttttttaggacatcttttgatacctttaaaagaaccactgtcaagtaatccttaaaagaatatcttggaaaaggaaacagattttttcctgtgtgtaagcaataagtgaagttacatttgccctaaccctagggatgattctttacccagttttaaagcccatcatggtattctaaggngttgacaccctccatcctcagagcaggtcgaaaatattaaatagactggggactctatgatgggcagcctgtgctttttgacttcagtttgctatttttctgngatcacattagt

SEQ ID NO: 632 - DNA, 201 bp, Homo sapiens
actaaaattttaacctgtgttctaagtagaaactgatttaacccaagtaatgcagctttgattgatttcagcattcgttgctttgctatttttacaaaacagcattgattgaagcaagtcttggttttactaaggtagggtagcatttgctattggtaaagagaataaatacacttaatttcacaatacattgttatatgt

SEQ ID NO: 633 - DNA, 536 bp, Homo sapiens
ataaaaccattttctgtaatcaaatgattggtgtcattttcccatttgccaatgtagtctcacttaaaaaaaaaaaaagaaaaagaaatggataatttcatctactgcctttacttggggttaatgtgattcttaaacaccttcatcatggaactctcagagtggggtccgttttggtttcctggtggtgggttttgaaagataagggaaagcacattttgagcatgtctgggtaccatggtgcggatgcttgggaaccagaactgtttcagaggaatctgaagtctgattttagttttcagagacacagcttgttgtaaaacatgagaagacatgatttctaggactcaagcagcaagccaggattctaggttggccgctgtgtcatccttgaagtcaagacaaagctgggctcgaccttcaagggtcctcgttttgataatacttcagaatagggaactcatgtgaatactactatgtagaaataaaacctagaccttgagcgaacatctgtatattggttgaaaacgatagtg

SEQ ID NO: 634 - DNA, 91 bp, Homo sapiens
acaggactaggaagcagataaggaaaatgattatgagggcgtgatcatgaaaggtgataagctcttctatgataggggaagtagcgtcttg

SEQ ID NO: 635 - DNA, 235 bp, Homo sapiens
accttgttgaaaccccggccgtgtagaacaggcctggccctctgccagggtaatatgggagacagacgtcctcggtgagcttggttgtaaaggcatctgctgcagctcaggaagcaatgaagagccgagacccaaggcctcatccacttccaggagggctccctttatgggctcttggcgactgtaacactgtttagcacagaaactagcacagaaatattacagatgatttggt

SEQ ID NO: 636 - DNA, 249 bp, Homo sapiens
acaggctgtcaaccaaagaggtcggagtccccggtctccctcaggccatcctcatgtcagaaggcctcgttctagatcaagggacagtggagacgaaaatgaaccaattcaggagcgattcttcagacctcacttcttgcaggctcctggagatctgactgttcaagaaggaaaactctgcagaatggactgcaaagtcagtgggttaccaaccccagatctaagctggcaactagatggaaagcccgt

SEQ ID NO: 637 - DNA, 288 bp, Homo sapiens
  misc_feature 182: n = A,T,C or G
ttttttttttttttttggctctagagggggtgctatagggtaaatacgggccctatttcaaagatttttaggggaattaattctaggacgatgggcatgaaactgtggtttgctccacagatttcagagcattgaccgtagtatacccccggtcgtgtagcggtgaaagtggtttggtttanacgtccgggaattgcatctgtttttaagcctaatgtggggacagctcatgagtgcaagacgtcttgtgatgtaattattatacgaatgggggcttcaatcgggagt

SEQ ID NO: 638 - DNA, 629 bp, Homo sapiens
cgagcggccgcccggcaggtacaatttaatttttctgcttgcccaagaaacaaagcttctgtggaaccatggaagaagatgaaaatgagactggcaaagaacaaatgctgaatctgaagaagatttgggcaaataatctgcatacttttaattgggaataagatggaaaatatgaatgctaaatcaaattttttaaaaaatacaccacacgatacaactcaatacaggagtatttcttctcaaattcttctagcaccatcaacattcttcaagtatctgaaatactattaattagcacctttgtattatgaacaaaacaaaacaaggacctcagttcatctctgtctaggtcagcacctaacaatgtggatcacactcatgggaaagtgttttgaggtagtttaaacctttggaagtttgggttttaaacttccctctgtggaagatattcaaaagccacaagtggtgcaaatgtttatggtttttatttttcaatttttattttggttttcttacaaaggttgacattttccataacaggtgtaagagtgttgaaaaaaaaattcaaatttttgggggagcgggggaaggaagttaatgaaactgtattgcacaatgctctgatcaat

SEQ ID NO: 639 - DNA, 161 bp, Homo sapiens
  misc_feature 32, 54, 55, 56: n = A,T,C or G
actaagtcacacccagccagtcaataacatgngaaatcaaaataaaataataannncaaagaattacataaatacagggccttttgagatttttggcaattgtaaacaaaaacgaatggtttttacaattcagtgtaattctacgaatatttatttggcac

SEQ ID NO: 640 - DNA, 225 bp, Homo sapiens
acagcaatgtggagccccggggctgtgcagtccagcactgctgtccggctcagcagatccggaaaggggaggatactgttgaagagcaacaaccactcaccctgttggggagaaaggtgctgggaggggaagtccaggcctccttgtgccagctaccaggagggacactcacctcatcatgtagcagtgagaagtccagactgctcacaggaggaaaagtggggt

SEQ ID NO: 641 - DNA, 526 bp, Homo sapiens
actgtgcaggtgggttagaggctgcgtggcaggagaggttcagattttcccctgatctgtaagatgtgtttagaggggaaatggtgggggcatccgggccatagaggacattcaggatgactgaatcactgcgcctggcactcactgggttctgggtttcacatttgtagcttgctgtgtcatttcttgtgacattgaatagagtgagggtcctgttgccattggacagctgcagcctgggactgaccgggaggctctgattgtttacccaccacaggtaggttgcgtcctgagtctcaggttcacaggtgaaggccacagcatccttgtcctccacgggtttggagttgttgctggagatggagggcttgggcagctccgggtatacccggaactggccagttgcttcttcattcacaagatctgactttatgacgtgtagggtgtagaatcctgtgtcattctggatgatgttctggatcagcagggatgcattggggtatattatctctcgaccactgtatgc

SEQ ID NO: 642 - DNA, 555 bp, Homo sapiens
accgcggccgttaaacatgtgtcactgggcaggcggtgcctctaatactggtgatgctagaggtgatgtttttggtaaacaggcggggtaagatttgccgagttccttttactttttttaaccattccttatgagcatgcctgtgttgggttgacagtgagggtaataatgacttgttggttgattgtagatattgggctgttaattgtcagttcagtgttttaatctgacgcaggcttatgcggaggagaatgttttcatgttacttatactaacattagttcttctatagggtgatagattggtccaattgggtgtgaggagttcagttatatgtttgggattttttaggtagtgggtgttgagcttgaacgctttcttaattggtggctgcttttaggcctactatgggtgttaaattttttactctctctacaaggttttttcctagtgtccaaagagctgttcctctttggactaacagttaaatttacaaggggatttagagggttctgtgggcaaatttaaagttgaactaagattctatcttggaca

SEQ ID NO: 643 - DNA, 153 bp, Homo sapiens
acactagcaagtatctgtgaatccttagcactggcgggttaacagaaatgctttggtaatacctacttagttaattggaggaagtagtaaataaacattaggtaatctgcagattacttcaaatgggaaaaatctttttgtagactctatagt

SEQ ID NO: 644 - DNA, 320 bp, Homo sapiens
actaagcaaacaagcaataaaaaggggaatggggtgtgctagtgtttgaatatgctctcttgttgctctaattctgtgcctctgtgcattaatatttggatgcatgcaatgccagcatggaaattggtcttcacacatactgcagttttccagaaacattcacaaaccaataaatgtaacagacattccatttgttaatgggcatatatgtgaaaagcagtgtagaaaataggctaatattagaaaatggttaagtcctaaataacttcaagtgtggttatataatggacactgtcaatgttcataacttaaacctgggt

SEQ ID NO: 645 - DNA, 345 bp, Homo sapiens
acaaaatccatcaggcatcttgcaggaatgtgtgcagtcagctcccgggaagaactgacggctccctgaattcttgggctggatttggtgagcactaaaaggaaccggattcgttaaacgctggtagaagtgttttccaatggctgcaacggttggtcaacctaacttacgtaagtttacaaccgaaaaaaaaatccacaatggaaatatagcaggtcgatacagccgggggcggctaggaaagagggaaaagtgaaaggtgagattacgagagtctattaagtgtctgggatataaagacagcgccagggaaaggggaagtcgcttctgagcctttcgggcagt

SEQ ID NO: 646 - DNA, 383 bp, Homo sapiens
acctgcaatatatttggagtattatgtctttattgttgttaaaaagtttttattgaatgtatgaaaattatcaaattgtattcatcattattaacatgtcctggggaaggaagggaaactttctaggacagaagtcactttcagatgtcatgtatgtattgggtgttcaatcatatctaacactgttttgatttttgtgggaaaatattccaggaaacgctaattctctttagactccttgttcttttatgactacaatgaacatatgtctatgtgatagctaaagatatttttgaattgtatgtgtgcttaattatcggtaagtataaatatttgagaaaacacatggtctggatatttaaaaccctcataaacatgttggt

SEQ ID NO: 647 - DNA, 379 bp, Homo sapiens
acctgctgaatctaaaataaaataatatacactaaaatgttaaaattgattttagtagaataaaaggtgactgaatattttaaaaagttatgcctagatgaatactttatgattttacattgcagcattttttgaacatggcagcagctactatgaattgtctatccaactgccactccagcttcctccctactaacaaaaccccagctcaagggcaagtgtgctcagtgccaggggatacactagtcgacccatccccctttgccagggcctggtccaagagtgggcacgtggccccactctataaagagacaggggggaggttgctggagctgctgacggttattcccggataagggcagaatgagaaggctcctgt

SEQ ID NO: 648 - DNA, 451 bp, Homo sapiens
  misc_feature 4, 5, 276, 342, 391: n = A,T,C or G
cctnngttcctctgggggttgagaataagaatagtggggagggaaaaactcctccttgaagatttcctgtctcagagtcccagagaggtagaaaggaggaatttctgctggactttatctgggcagaggaaggatggaatgaaggtagaaaaggcagaattacagctgagcggggacaacaaagagttcttctctgggaaaagttttgtcttagagcaaggatggaaaatggggacaacaaaggaaaagcaaagtgtgacccttgggtttggacangccccagaggcccagctccccagtataagccatacaggccagggacccacaggagagtggattagngcacaagtctggcctcactgagtgggcaagagctgatgggcctcatcangggtgacattcaccccagggcaggcctgaccactcttggcccctcaggcattatcccatt

SEQ ID NO: 649 - DNA, 165 bp, Homo sapiens
accatgctgtccatagctgtcgctgaaagtgtcctttgggggtatgagccagctcttccagcaacagcaggcaaaggtgggggaaaataagtagtgctggagggctcaaaatggtcagctgttagaatgtgcaagcacttggggacagcatgagcttgctgttgt

SEQ ID NO: 650 - DNA, 358 bp, Homo sapiens
acccgggctccacattcatggatcatgtgttacgctatcaggacactccaggagtcaaaatgattgtggttcttggagagattgggggcactgaggaatataagatttgccggggcatcaaggagggccgcctcactaagcccatcgtctgctggtgcatcgggacgtgtgccaccatgttctcctctgaggtccagtttggccatgctggagcttgtgccaaccaggcttctgaagctgcagtagccaagaaccaggctttgaaggaagcaggagtgtttgtgccccggagctttgatgagcttggagagatcatccagtctgtatacgaagatctcgtggccaatggagtcattgt

SEQ ID NO: 651 - DNA, 180 bp, Homo sapiens
accctaaccgtgcaaaggtagcataatcacttgttccttaattagggacctgtatgaatggctccacgagggttcagctgtctcttacttttaaccagtgaaattgacctgcccgtgaagaggcgggcatgacacagcaagacgagaagaccctatggagctttaatttattaatgcagg

SEQ ID NO: 652 - DNA, 246 bp, Homo sapiens
gccctacaaagaaaatggagagcctcttctggtggatgctttgctccctctgagctgcccatgctggtctggcaaacacacctttctgctttgccttcacaaaagtaatgtgttccctttcccaccccttgcctgaccctcagggagtcagcctgcttccatccatgggtgggaagacttcagcacaaaggaaagactaattcttgtcaggcatttttgaaaaggctgattatgtgtatcaaggta

SEQ ID NO: 653 - DNA, 573 bp, Homo sapiens
aggtacgtagtctaggccatatgtgttggagattgagactagtagggctaggcccaccgctgcttcgcaggcggcaaagactagtatggcaataggcacaatattggctaagagggagtgggtgttgagggttatgagagtagctataatgaacagcgatagtattattccttctaggcatagtagggaggatatgaggtgtgagcgatatactagtattcctagaagtgagatggtaaatgctagtataatatttatgactactaaattaataaatttattccacttttgaaatgacagccaaaaatccacctaattgattctcatttggcacgttcttctcaattctgttcactaaattaaaattactaaatttaaactgccaagagccatgatgttgtctgcacaagacaacattttccatcactttcagaaagttatatttggcatgttaaggaaaaaaaatataatcccacagcagcagctatttaaaataagacagccacaggattcatgcagaatatttttaaatattcctgttgaacacaatgatttaattgattttttcttcac

SEQ ID NO: 654 - DNA, 474 bp, Homo sapiens
gttttcctgagcagaagcaaagcctcaaaatacatgcacaccaggtaggattattgttaatgaaaagtataatttcagtgtctttacaacttagtttgtgtctaaaatatgaactagtgtttttttccacttgttaaattgatcttgtatttggttttgcgaattttcaaacaaagaataaagaacatgaaattagactatatattctgtcattttcccctgagttttttctaatcttgtcccttcatacttttccccaaaggctcagcgtcttccatttctttcaagctcaaatctttcactggatgttttgaggggtaatgatgagactattggatttgaggatattcttaatgatccatcacaaagcgaagtcatgggagagccacacttgatggtggaatataaacttggtttactgtaatagtgtgctgttcatggaaaccgagggctgcatttttttcaggtgtcagt

SEQ ID NO: 655 - DNA, 603 bp, Homo sapiens
actgaatttctgtcagttaaggggttcactgctttggtggaaattggtggaaattgctagcaggttccacgatgtttatttttttctccatgttgtatatcattaccatttcacatacgcgtttctatttttcttcctctcctcctgatctccttaaaaatgaatctagagttggtggctttttccccctcctctttggccagttccacagttcagttcttcctgaaaacagggatgatgaacttgtaggatcaggacaaatgtgtgtttttcaaaaacttaaggctgggtgtgaaacaccttctgtggacaaggatttgtaaacttctctcctccctccagctgcggccccagcctaactgatagttacttgattcagtgtgctagacacttaaatagcatctatgtctctttcaagggaatttgtcaaataatgctgtttagctaattgttgcaagcaattgcatattaacagctgtgattttgttggacagcaagtattatggccaaagccagtttcttggcatttcaaaaataatgcaataaaaaactagttgaggttagctgaggctggaaatgccttttcatggtaaatgattcact

SEQ ID NO: 656 - DNA, 361 bp, Homo sapiens
acctactgttcagtcttcacgccatagtgaagcttggaatccctcagaacactattttggtgcagactttgctgagggtgacccaggaacgtatcaatgagtgtgatgagatatgcctttcagttttgtcaactgttttagaggcaatggaaccatgcaagaatgttcatgttctacgaacgggattcagaatactagttgatcagcaagtttggaaaatagaagatgtcttcacattacaagttgtgatgaagtgtattggaaaagatgcaccgattgctcttaagaggaaactggagatgaaagccttgagggaattagacagattttctgttttgaatagccaacacatgtttgaagt

SEQ ID NO: 657 - DNA, 264 bp, Homo sapiens
  misc_feature 13, 23, 41: n = A,T,C or G
tacctgatctctntaggtatggngctgggtgcagatgcagngtggctctggatagcaccttatggacagttgtgtccccaaggaaggatgagaatagctactgaagtaagttgaaaattccctctcaaaaaggtttaaagccattggatgtgccacaatgatgacagtttatttgctactcttgagtgctagaatgatgaggatcttaaccaccattatcttaactgaggcacccaaaatggtgagttggggaacatagagagt

SEQ ID NO: 658 - DNA, 232 bp, Homo sapiens
accatcaaataatctggtgaatggcatgtgagaataaagcaaaagtgtattaagatttactgatgactggcattcatggtatctgaccagaagaagtaaagggaagcacgaaccaatgtgtttgcagggctcttctgggaagaacagctcttggttttgccctggtccctgacaatgacagactggcaggctgtttcttgcacagctctaggcaagccattaatctgtcagt

SEQ ID NO: 659 - DNA, 638 bp, Homo sapiens
  misc_feature 507, 602: n = A,T,C or G
acattgtagccctctgcctctctacccttaacagctgcatcgacccctttgtctattactttgtttcacatgatttcagggatcatgcaaagaacgctctcctttgccgaagtgtccgcactgtaaagcagatgcaagtatccctcacctcaaagaaacactccaggaaatccagctcttactcttcaagttcaaccactgttaagacctcctattgagttttccaggtcctcagatgggaattgcacagtaggatgtggaacctgtttaatgttatgaggacgtgtctgttatttcctaatcaaaaaggtctcaccacataccatgtggatgcagcacctctcaggattgctaggagctcccctgtttgcatgagaaaagtagtcccccaaattaacatcagtgtctgtttcagaatctctctactcagatgaccccagaaactgaaccaacagaagcagacttttcagaagatggtgaagacagaaacccagtaacttgcaaaangtagacttggtgtgaagactcacttctcagctgaaattatatatatacacatatatatattttacatctgggatcatgatagacttgttaggctncaaggcccctcagagatgatcagtccaactgaacga

SEQ ID NO: 660 - DNA, 502 bp, Homo sapiens
  misc_feature 269: n = A,T,C or G
acctgtgggtttattatctatgggtttatatcctcaaatacgacattctagtcaaagtcttggtaatataaccaatgttttcaaatgtattctgtcatacaaagagcagatttttattgaacttgtgcaataactatattaccatacaatataaatattcatgaatagtttcccaagtctggagcgaccacatagggagaaaatgtaaatgtctcaatttttgttcacaaaagtatattttatcaaattgctgtaagctgtggatagcnttaaaagaaaaaaagtttcctgaaatctgggaaacaagacatttaaagaatcagcaaaatttcaaataaaaaattatgaaaatattatcctcattagttcatttagtcccatgaaattaattattttctctgcttgatcttggtggacagtttcatgaagctgtcagttagttcattaaagttttggaaattctcagacagtgcagtggtatcagaaacttgtattcaagagt

SEQ ID NO: 661 - DNA, 112 bp, Homo sapiens
actttagtcataatcgtgaagctggctaggtttccagtaaatatcagcattttatatgggcaaaagcagttaataaaaatcagttcatttactgtaagccaaatgtgcttgt

SEQ ID NO: 662 - DNA, 530 bp, Homo sapiens
  misc_feature 9, 422, 475, 495, 508: n = A,T,C or G
actgccggntaacgctgtcgtttccattgagcctgaactgatgggtgaggtcgtagattctccaagaagaactgaggttgtggagcgggcaggtaggactattgttcccgttgcgtcttggctgctgtgggatgctgttgattcctcactacggcctgaggttgtggagctgtcagggaagtgtgttgttgcagttgagcccgggctgctgtggtagctggtaggttcttcaacaagggcagatgtggtgctaggagctgaagatattgtgtgtgttgtgctgctgtgggaagttgttgattcttcaccacggcctgaagttgtgtcgctttcagggaagtgcattgtttgagttgaggcccgggctgcctgtggtaggtcgtagattcttcaacgaggcctgaggttgtggaggtgggcangcgagggtgttgttgcagttgcaactgggctgctgtggactgttgtccgattncctcactacggcccaaaggntgtggagctggcngaaaaagtgggttgttggagtt

SEQ ID NO: 663 - DNA, 255 bp, Homo sapiens
accttcaatgtcattaaccataaatgagcatttacaatctggattaaatgtcacatggtattaagtctacacttagagtaatgcttttactgatttttaaaaatatgtgcatatgtttagtgatcgagaaaagtgaaatactggagtactctgggtgcaataaataatatgtagaaatttaagtcctccaattccagcatatccagtgagttttgacagtgtgtttatgtggaatgtttaaggatatacaattgt

SEQ ID NO: 664 - DNA, 496 bp, Homo sapiens; identical to SEQ ID NO: 302

SEQ ID NO: 665 - DNA, 292 bp, Homo sapiens
  misc_feature 28, 124, 131, 253: n = A,T,C or G
ttttttttttttttttttttttctctanagggggtgctatagggtaaatacgggccctatttcaaagatttttaggggaattaattctaggacgatgggcatgaaactgtggtttgctccacanatttcanagcattgaccgtagtatacccccggtcgtgtagcggtgaaagtggtttggtttaaacgtccgggaattgcatctgtttttaagcctaatgtggggacagctcatgagtgcaagacgtcttgngatgtaattattatacgaatgggggcttcaatcgggagt

SEQ ID NO: 666 - DNA, 250 bp, Homo sapiens
acttggatgaggaactgatggtcctaagctcaaacagcatgtctctgaccacacgggagccctctcttgccacctgggaagctacctggagtgaagggtccaagtcttcagacagagaaggaacccgagcaggagaagaggagaggagacagccacaagaggaagttgttcatgaggaccaaggaaagaagccgcaggatcagcttgttattgagagagagaggaaatgggagcaacagcttcaggaaga

SEQ ID NO: 667 - DNA, 259 bp, Homo sapiens
  misc_feature 233: n = A,T,C or G
ccgctctccagcccgcttgaacgctccccgcagccaccgccacccattggaatggccaacaggggacctgcatatggcctgagccgggaggtgcagcagaagattgagaaacaatatgatgcagatctggagcagatcctgatccagtggatcaccacccagtgccgaaaggatgtgggccggccccagcctggacgcgagaacttccagaactggctcaaggatggcacggngctatgtgagctcattaatgcactgt

SEQ ID NO: 668 - DNA, 248 bp, Homo sapiens
actgatgaaagttattaacacgtttcgaaaaataactttactatctgacgtgttgcttctgccgaggatgaccgttattcctgtttttgcatgtatatttcacgtatggttaaatgtgccagcgttgtggtttaaaactaatagtaataatatgcttctttgttcagttggctagagatttactacatccgtccttggaagaggaaaagaaaaaacataaaaagaaacgcctaggtactgcggcaagt

SEQ ID NO: 669 - DNA, 430 bp, Homo sapiens
  misc_feature 16, 289, 346, 350, 378: n = A,T,C or G
acctgcaaattcttancaatacctttaccaccagattagaacagtaagcataataaccaatttcttaataagtaatgtcttacaaataaaaacacatttaaaatagctttaaatgcattcttcacaagtaattcagcatatatttttatatcatgtttacttatgcttaagaattaaagcaagtatatttattactctgatggaaatatgggaaatctctcattcatgcaatatacagggataatattcaagcgaaggggaaattcccgctttttatttttgtaaatgnatccatatataatcatcgacatgacagatgaggaaacccatgaagtttcccaactantcanatatacattttcacttcatcaggaagcnccctgatatctacagctaatttataattagatactgtttcaatgaaaccaaa

SEQ ID NO: 670 - DNA, 435 bp, Homo sapiens
  misc_feature 420: n = A,T,C or G
caggtactctgaggcttgtaggagggtaaaatagagacccagtaaaattgtaataagcagtgcttgaattatttggtttcggttgttttctattagactatggtgagctcaggtgattgatactcctgatgcgagtaatacgggtgtgtttaggagtgggacttctaggggatttagcggggtgatgcctgttgggggccagtgccctcctagttggggggtaggggctaggctggagtggtaaaaggctcagaaaaatcctgcgaagaaaaaaacttctgaggtaataaataggattatcccgtatcgaaggcctttttggacaggtggtgtgtggtggccttggtatgtgctttctcgtgttacatcgcgccatcattggtatatggttagtgtgttggttagcaggcctagtatgangagcgttatggagtg

SEQ ID NO: 671 - DNA, 379 bp, Homo sapiens
  misc_feature 20, 21: n = A,T,C or G
acctcaggtgccaggcatgnngttctccgctgtctggagtcttgctttgggagtgctacacctgtgggagtgccccaggcaccacccaaaggcggggctctggctcaagcttgcatggtttacagagcctcacatgatgtcctttcaggtttgttgagttggggctagggactcggtggcagcagagcctggttctcctgcctgaccaggccttggcaggacgcctcttcccttctgtggagaagatggagaagcagagaagcaggatacagagcaggctggaaaggactagaagcctcatggtgagaaggcagattttcacgtcctgggaagggagctgtgctgcagaagtcctcccttggggccaccttggacattt

SEQ ID NO: 672 - DNA, 546 bp, Homo sapiens
actgtttactaattcaaagaacactatattcattcatatcaattttattcattaattatgaacaataaaatataatattccatgcttttcatgaaatagtggtttcttcttccagtctaatcagggaactaataaatgcttagttcatgggaaaacttccatttgatttacattgacttaattacttcttagggtctagcctcatccatggagaaaaagcactttttcttgaggcaacagcaaattaacagcactgatacaaaatatggcaaattcaatggttgtagcattgctttaggaattttgagactataaataaaactataaccataaataaaagggcttattaatatcttcttttcaggagagtgatacattctgaagttttcttgttattctgttgaatagcaaggacttccaaacttaaatgtcttaaggctgaaaattagttatattcctcaaattttagccttattaatgaaattccaaaagtattataaaataagattcaatttgtcttgaaattataaatttgtaacagatatt

SEQ ID NO: 673 - DNA, 497 bp, Homo sapiens
  misc_feature 17, 420: n = A,T,C or G
cacgaggaactcatgcnaaggaggggactttcggaaatccaaacttagagtgccttgtatttagaatccggaaggaaaaggaaatgaaatgtgaagaaactcatgcaccaaactcgaactggtaagaagactgttagaatgccctcggtaacacagaggctgagagatcctgacataaatccttgtttgtcggaatctgatgcttccaccagatgtctggatgaaaataactatgacagggaaaggtgttccacttacttcttgaggtacaaaaactgccggagattctggccgtgaaagatccttgagagctcttgttagctgcctcgtcgtcctctaagctataagaatgcagttttaatatagaattctatcgtgatgcagagaagaaagaacggagtgaagccatttatgcctacngcagcagaaagagatgaaatcttgagagcagtgggaaatatgccctatttgaatgtttgcattaaaagtgtttatat

SEQ ID NO: 674 - DNA, 550 bp, Homo sapiens
  misc_feature 150, 199, 200, 475, 524, 533: n = A,T,C or G
acaaagtaatgaccataataccttgtctaaatcagtagcagggcttcatggctaggaaacttttttaaacagtaaaatgtcattaggatagatcactctctcaccaacattaaatgtggcagaattaaccaaaaaaaaaaaaaaaaaaangaaaaaaagatttacacgtagatatagcagtaacagaaaattacaaggnngagaacacaaaagaatcaagacaacgctataggttcaacagtattccatgaggctagaaaaccggttaactttgaaagccctagcaaaatatcactctttgtttataaatcacttatttatcatatgaccacacgttgaatccttgtctttccacatactgaagaatcctacattcagcctttaagcattctgcatttctttgccaatcttgtagctgagtatcttgttccagtcgattttggtgcgggtaactggaagctgccgggcgcaaggnccttgaatgtggtatctgacattgtttgatagttttcactaattgctgnctgatactnattttctgcattctcta

SEQ ID NO: 675 - DNA, 162 bp, Homo sapiens
  misc_feature 13, 64: n = A,T,C or G
actttccacagtnaaatttacattaatggcaatttttgatagttttatggctttttactgttanactaatcaaaaataactttaaaaggaacaaagaaactccaacatttcacattatgcatagttatgtagccatttcacagtttctttaagatgtgtaaa

SEQ ID NO: 676 - DNA, 349 bp, Homo sapiens
acttatgttgaggaaatcacagaccttcctatcaaacttcgattaattgatactctacgaatggttaccgaaggcaagatttatgttgaaattgagcgtgcgcgactgactaaaacattagcaactataaaagaacaaaatggtgatgtgaaagaggcagcctccattttacaggagttacaggtggaaacctacgggtcagtggaaaagaaagagcgagtggaatttattttggagcaaatgaggctctgcctagctgtgaaggattacattcgaacacaaatcatcagcaagaaaattaacaccaaatttttccaggaagaaaatacagagaaattaaagttgaagt

SEQ ID NO: 677 - DNA, 214 bp, Homo sapiens
  misc_feature 12: n = A,T,C or G
tgggatacaggncacgggcagagctcctggcctcaatgatgcctcctgatctatcgctgggcctggacgaccaacactgggatgatgatgagcagaatggtcatgaagatgcccaaaatcagggcccagatgttcaggcacttggcggtggaggcataggcctgggccccggtcacgtcgccaaccatcttcctgtccctagacttcacggagt

SEQ ID NO: 678 - DNA, 195 bp, Homo sapiens
  misc_feature 172, 173, 174: n = A,T,C or G
accattggtggccaattgatttgatggtaagggagggatcgttgacctcgtctgttatgtaaaggatgcgtagggatgggagggcgatgaggactaggatgatggcgggcaggatagttcagacggtttctatttcctgagcgtctgagatgttagtattagttagttttgnnntgagtgttaggaaaagggcgt

SEQ ID NO: 679 - DNA, 59 bp, Homo sapiens
aggaacctaactatgttcagtactccagatatacttcctgaactgacctggatgaagaa

SEQ ID NO: 680 - DNA, 244 bp, Homo sapiens
accattggtggccaattgatttgatggtaagggagggatcgttgacctcgtctgttatgtaaaggatgcgtagggatgggagggcgatgaggactaggatgatggcgggcaggatagttcagacggtttctatttcctgagcgtctgagatgttagtattagttagttttgttgtgagtgttaggaaaagggcgtacaacgtgcgatccatgcccatccgaaaggatgatgaagttcaggttgt

SEQ ID NO: 681 - DNA, 155 bp, Homo sapiens
gatttttagggttgtttggccagaacaagagaaataactgcagaaaacacatatggttggaaaccatgcgcttgtgactttttctgtagcctatgggagtggacagagtgggtaacccaagatgtttttaagactgactggactaagaatgacgt

SEQ ID NO: 682 - DNA, 284 bp, Homo sapiens
actgagcccatatgacttgacccacaaggggaaatactggggcaagttctacatgcccaaacgtgtgtagtgagtgtaggagataactgtatataggctactgaaagaaggattctgcatttctattcccctcagcctacccactgaagtctttgggtagctcttaagccataactaaggagcagcatttgagtagatttctgaaaaacaatgttatttgttgatttaaaaagaaaactgtatttttattaaataaaatttaaacatcacttcaggaaaaaaaa

SEQ ID NO: 683 - DNA, 272 bp, Homo sapiens
acactttgtgttaaaattcatagggaagacttcttaaaaacaagtgaaattgttaaaaccccccctaagcattacagatggcttatagctgtccacggggttggtagaggtgggaaagggaagggttctaggccagaatgttcctatttagaagacactcaaattacagtctgtgttatgtatgtataccatttattcaatgctactgtgtatataatggaaaacttaagtccagtttgaaacatctagtctttctaggtgtttaaaagtgt

SEQ ID NO: 684 - DNA, 384 bp, Homo sapiens
accattcgaccacaggcagcaaaggacagaacttgatcagctaaaacatcataaccttcaagggcctataggacccttctagaattttctgaatcaggaacggcccatgttgtggcctgtgtagtcaggtgtatattaaagatttactccaggtagatgggttttgctttccaaaattattgtagggttctcagccacaaagataaaaagaaatcttgaactgcaattgaaataaaacatggagcccccaaatccctagctgccatatgatttgaatcagttggagaatgtaaaatcattgccatggtgtgatgtaacaggagtgaagagccctaggtcttggttctgttgctgtctggctgtgtgagcctgggcagttcatgt

SEQ ID NO: 685 - DNA, 652 bp, Homo sapiens
  misc_feature 635: n = A,T,C or G
acttttgagtaaactattcagattagacaggctaatgctaagactgcattttgtgctactgacatgcactatatagatcgtacactactagatggaaagttggtccatgtccatttatttaaagattctgtaacacctgtaatagtatttaatacagctcccacatactatattcctctcacatagacatagttatttttagtggggataaggatatgactttaacatgctatgagattctagctaagtaaaataaaaacaatatggactcagattttcttaggagatattagttcaagtttttaaactgggaaacaatcaacttccatatatccaggagaaacttagcatggggggaggtgccttagttgatgtgcctgataagcaaactgttagttgtctattagtattatgttttcggcttaatgtaacaacaaaagaaagttgtcacactacctctcagataatatcaattacaatcttagagactgtaattgggaatacaatcctataacaagttattaacaatatcatgaatagttattaagtaagtgccagcactacatgcaacttactggtcaccaactcagaacccataaaactatacacatatgcacaaaaaaaaaaactccaangaagatacctatcactg

SEQ ID NO: 686 - DNA, 536 bp, Homo sapiens
  misc_feature 431, 474, 475, 477, 500: n = A,T,C or G
accagctactgaatacaccggatctagatatgcccagttctacaaatcagacagcagcaatggacactcttaatgtttctatgtcagctgccatggcaggccttaacacacacacctctgctgttccgcagactgcagtgaaacaattccagggcatgcccccttgcacatacacaatgccaagtcagtttcttccacaacaggccacttactttcccccgtcaccaccaagctcagagcctggaagtccagatagacaagcagagatgctccagaatttaaccccacctccatcctatgctgctacaattgcttctaaactggcaattcacaatccaaatttacccaccaccctgccagttaactcacaaaacatccaacctgtcagatacaatagaaggagtaaccccgatttggagaaacgacgcatncactactgcgattaccctggttgcacaaaagtttataccaagnntnctcatttaaaaagctcacctgangactcacactggtgaaaagccatacaagtgtacctg

SEQ ID NO: 687 - DNA, 201 bp, Homo sapiens
  misc_feature 16, 17, 18: n = A,T,C or G
acggccagggctattnnntgaatgagtaggctgatggtttcgataataactagtatggggataaggggtgtaggtgtgccttgtggtaagaagtgggctagggcatttttaatcttagagcgaaagcctataatcactgcgcccgctcataaggggatggccatggctaggtttatagatagttgggtggttggtgtaaat

SEQ ID NO: 688 - DNA, 452 bp, Homo sapiens
acttgttccaactcaagacccaggaccacccccaccttctccattactaggtttgaaaccactgcagttattagaagtgaaagcaaggggaagatttggttgtgtctggaaagcccagttgcttaacgaatatgtggctgtcaaaatatttccaatacaggacaaacagtcatggcaaaatgaatacgaagtctacagtttgcctggaatgaagcatgagaacatattacagttcattggtgcagaaaaacgaggcaccagtgttgatgtggatctttggctgatcacagcatttcatgaaaagggttcactatcagactttcttaaggctaatgtggtctcttggaatgaactgtgtcatattgcagaaaccatggctagaggattggcatatttacatgaggatatacctggcctaaaagatggccacaaacctgccatatctcacaggg

SEQ ID NO: 689 - DNA, 254 bp, Homo sapiens
acaacagttgagagcagcaccaagtgcatttagttgaatgaagtcttcttggatttcacccaactaaaaggatttttaaaaataaataacagtcttacctaaattattaggtaatgaattgtagccagttgttaatatcttaatgcagatttttttaaaaaaaacataaaatgatttatctgtattttaaaggatccaacagatcagtattttttcctgtgatgggttttttgaaatttgacacattaaaaggt

SEQ ID NO: 690 - DNA, 481 bp, Homo sapiens
actttctccctttgtaaagacttggggagtaaggacattaccaactaaattgcttcttcgaaactgaagtgagtcccggtttgtttcattttaatgggagggtaataaagatgaaagaccaacattttaactgatggatcccttaagctacagaatagaaatttattgtgttttgagggaatatactaaatgcagctatgtaaaaataaaattcaaacgcccaggattaaaataaaatataatctgaaaacctcatgttctctctttccccaaactaagaaagtgcactgcatgctgttttcacttattcttagaaaacaagcatgaaagattccgcccattcagataatgccaaaaatatgtttaaacttttttttattcttttgaaaaatgatttgtaaattgagggtcatagttcagcatcagtttcatcttctgggattattgttcaagaccagcctctaatgggaggtgaaacggt

SEQ ID NO: 691 - DNA, 291 bp, Homo sapiens
acaccatgctggcaggatatactccatttgccaacggtcccagtgacacaccagaggaaatcctaacccggatcggcagtgggaagtttaccctcagtgggggaaattggaacacagtttcagagacagccaaggacctggtgtccaagatgctacacgtggatccccaccagcgcctcacagctaagcaggttctgcagcatccatgggtcacccagaaagacaagcttccccaaagccagctgtcccaccaggacctacagcttgtgaagggagccatggctgccacgt

SEQ ID NO: 692 - DNA, 411 bp, Homo sapiens
  misc_feature 345: n = A,T,C or G
accagaaaggttggggaccactggcttaaaataccaataaatttttgaaccttaaaaactttgaagaacaaggtaaattggtgttttatttaatgtcctaccctttaatttgttgcattttcctatactctttacactattttatcccaaactatgtatatgaggtgaaaatatatatgaaaagggatactgaagaatatttagtttaaaattaatttcttacgatcacgagcacatggtggcataattacaaagcttggaagtattcaaatagaaaatcaaaggtgtttcaatacagtagaatcccaggactgcattttaaaatcgcctcacagatcacactcnctggtggcaaatatcatcatcgttgctaaaggacagaaaatactgatgtgtgttttaactaactgg

SEQ ID NO: 693 - DNA, 308 bp, Homo sapiens
acttccaatcacttcctctatccagaaaatccgtgacactacatgccagctactttgcatatttataactgtttaataaactattcaaaattagcatctaaaataattatactttgggcacacgaaggcatatatttggtgagaacattgtaattttcattttgtaaactatatattctatattcaagtaataacacagcattgcctatacagaactgaggcctgcgctgagacccaaaacttgtcttttcctaaatgcaccactacgaagagctaataagaggtctgtccagatgctaagaccaggt

SEQ ID NO: 694 - DNA, 300 bp, Homo sapiens
actccaccatttaatagggtaaagaagagaaaccacgtgattatagcagttgatgcagaaaaaccatttgacagaattcaacacccatacatatttaaaaactctcagaaaaataggaattgaggaggacttcctcaacttgttaaagagcacgtgaacacacaccaaaaaaaaccccacaactaatgttatacttaagggcaaaaggtcgaaggccttgttccttagattaggaacaaagcagtaatgtctcttctcaacattaatcaacatattgatggaagttctagccagtgcagt

SEQ ID NO: 695 - DNA, 313 bp, Homo sapiens
  misc_feature 89, 90, 91, 105, 106, 132, 250, 262, 273, 298: n = A,T,C or G
acaagcttttttttttttttttttttttttttttggttaaaaaagtttaatgagctgtaaaataaatacacttggcattaaatattaannnaattatttacaacnngaaaaaatactttttaccttcgtgcncctttatatacagaaatagcataaaaagtgacaattgaaagtttaaaaccatcataacaaaaagggtccattgtcttatgatccactggaaagaggaccgactcatcatttatggctntgacttggcagngactccaatgngatatcctgtaattttatcttcagntatgctatagcatgt

SEQ ID NO: 696 - DNA, 273 bp, Homo sapiens
actggcccaggacagagctgccaaactggttgctgctgtctgccaaggttgctgcagttgagacgtctgtgcggtctgggtaactgagggaggctgagcggctgagtggggtggggtgtgctggggaacggtcggaggggaccgaggtcagggccatagtcccatagtaggagaaggcgcccgtctcaaacttcatgttctccttccctgcctccacctccaccttcccctgcaggatgaggatgaagtagtcggccggcttatttcgggtgt

SEQ ID NO: 697 - DNA, 445 bp, Homo sapiens
accaaagtcaatgaacaagaaacaccagttgactttaagacaatgacgaagattaaagcttaagggaaaaaaataaaagataaacatctgaaagcagcaccagatccttcacttgcaaataaggctagtccagtttaatcttcttggtatcctctctactttttaacatttttccttactaatccatatatttaatttcatgtcatattggatttaatcagactttaaaaattttccctttaatacccatatttaggcattagatatatagaatatgtatctatatataaatatatctctatcgcccatcctgcttatatttgactgaaaaacacaaccaccaaaatggacagttcagcaaaagcgcgttgtctgtaattctctggtgttgcttctgggcaaaccctaagtgatggtggagaatctaacagttcgttaggtctgt

SEQ ID NO: 698 - DNA, 495 bp, Homo sapiens
acacggtgacctcacagaaggagggctatgttctgactgcggtggaaggaaccatcggagacttcaaggcctatgccctggcaggcgtaagctttgagataaaagctgaggatgaccagcccctcccgggagtcctcttatccctgagcggtggcctgtttcgttccaacctcttgacccaggacaacggcattctgacattctcaaacctgagccctggccagtattacttcaaacccatgatgaaggagttccggtttgagccatcctcacagatgatcgaggtgcaggaaggccagaacctgaagatcaccatcacggggtaccgaaccgcttacagttgctatggcacagtgtcttccttaaacggagagcccgaacaaggggttgccatggaagcggtgggccagaacgactgcagcatttacggagaagacaccgtgacagacgaagagggcaagttcagattacgtggattgctgccgggatgtgtgt

SEQ ID NO: 699 - DNA, 413 bp, Homo sapiens
agatgacaaagaaaagaaggaacaatggtcgtgccaaaaagggccgcggccacgtgcagcctattcgctgcactaactgtgcccgatgcgtgcccaaggacaaggccattaagaaattcgtcattcgaaacatagtggaggccgcagcagtcagggacatttctgaagcgagcgtcttcgatgcctatgtgcttcccaagctgtatgtgaagctacattactgtgtgagttgtgcaattcacagcaaagtagtcaggaatcgatctcgtgaagcccgcaaggaccgaacacccccaccccgatttagacctgcgggtgctgccccacgtcccccaccaaagcccatgtaaggagctgagttcttaaagactgaagacaggctattctctggagaaaaataaaatggaaattgt

SEQ ID NO: 700 - DNA, 441 bp, Homo sapiens
  misc_feature 12, 13, 154, 249, 283, 284, 304, 328, 364, 365, 386, 387,396, 414: n = A,T,C or G
acgggaccctgnncacgatggaccgggtgctgacccccccaatggggactgtcatggatgtcctgaagggagacaatcgctttagcatgctggtagctgtcatccagtctgcaggactgacggagaccctcaaccgggaaggagtctacacagnctttgctcccacaaatgaagccttccgagccctgccaccaagagaacggagcagcactcttgggagatgccaaggaacttgccaacatcctgaantaccacattggtgatgaaatcctggttagcgganncatcggggccctggtgcggntaaagtctctccaaggtgacaagnctggaagtcagcttgaaaaacaatgtggtgagtgtnnacaaggagccctgttgccganncctgacatnatggccacaaaatggcgnggttccatgtcatcaccaatgtttctg

SEQ ID NO: 701 - DNA, 487 bp, Homo sapiens
  misc_feature 301, 302, 406, 441, 446: n = A,T,C or G
acatcaaattataaatgcaaaacaggttcagatttcatcttttgtgatttcttttaaatactattcatttttatttaaatgcacagtatttcccctatattttagtccttccattcctagagacaaaccagttatttggtggtgggaagtagctgaagcaaagaaggaaaagtaataccttagcttcaagagtagacattcttactagctcaatttaaataattgattttaaataggaagaaaagaggatatatttaagatacatagaaattatgatgtgaagtattcatgagaatctgtnnattccatcaaaataagtaggaactcatactaaaattgttggatttaaagaggcaacttttgtttatgattcaaatatgggaatttgagaaatatttcatttgtncactggatgtcactattttactaaaaaggcagctnttagngtgggactgtgactgaggtcttaaagactgaaagagttggg

SEQ ID NO: 702 - DNA, 304 bp, Homo sapiens
  misc_feature 13, 158, 159, 160, 247: n = A,T,C or G
tttttttttttgntcggctcagtctaatcctttttgtagtcactcataggccagacttagggctaggatgatgattaataagagggatgacataactattagtggcaggttagttgtttgtagggctcatggtaggggtaaaaggagggcaatttctnnntcaaataataagaaggtaatagctactaagaagaattttatggagaaagggacgcgggcgggggatatagggtcgaagccgcactcntaaggggtggatttttctatgtacccgttgagttgtggtagtcaaaatgtaataatt

SEQ ID NO: 703 - DNA, 366 bp, Homo sapiens
acaaagggactacatcgttggcttttgaccttgctgaaaaggaacatataattgtatggatggtaggattaagttgttgagtagttttgtaatcaagattttatgtaacatttgtaaagggaaaattagcacttttgtggttcttaagggaaaagaaacagaccttgtggagattataatttccttggtttctgttaccactgttagagggagttgtatcatttaacatatagtaggatagtttaagtgtagggaggacaattattgtctgaagctaaaatgggttatttataggactgatggaaatgatttcatctccgccatctctaaagcacttttcattgaacatgttagcctaggatacgt

SEQ ID NO: 704 - DNA, 449 bp, Homo sapiens
  misc_feature 15: n = A,T,C or G
acatggtcacataanaacaaatctaatggaaaaagaatatttcattctacttttctgccacttatcacagtgtaataagtgccagtaagtcctggaagacagttgcagaggaagattagaatcccagggctgtttgttaatatacatgattatattgtaagaataatataaaaacaaaataggtaagatatacaattaacatgcaatttaagctatattattttgaagaaacaggacagaatttagtgaacgcaacttaaaaatttgttaatgtagtataatcagcatatcatggtattttacatggtatggaattattcctccttaataatgcttggcaaattggaacaggctgatcctacttctagaacatattaaaatgaagatgaaggaaaacaagttggataattctattagatgcttttctaaatattctgaatttttaaagt

SEQ ID NO: 705 - DNA, 399 bp, Homo sapiens
  misc_feature 194, 195, 229, 276, 292, 355, 356, 380: n = A,T,C or G
acgatgtctagtgatgagtttgctaatacaatgccagtcaggccacctacggtgaaaagaaagatgaatcctagggctcagagcactgcagcagatcatttcatattgcttccgtggagtgtggcgagccagctaaatactttgacgccggtggggatagcgatgattatggtagcggaggtgaaatatgctcnngtgtctacgtctattcctactgtaaatatatggngtgctcacacgataaaccctaggaagccaattgatatcatagctcanaccatacctatgtatncaaatggttctttttttccggagtagtaagttacaatatgggagattattccgaagcctggtnngataagaatataaacttcagggtnaccgaaaaatcagaatagg

SEQ ID NO: 706 - DNA, 488 bp, Homo sapiens
  misc_feature 15, 16, 17, 372: n = A,T,C or G
gtcagactggatggnnngtgaagtaaaatagtatgaacaattaagaggctctccccctcttgtctttaagccatattctcctacatgtattttataagaaaatgttaagtcaaattttagtggctctttaattcctgacctcttcattctccttttcagtataacctcccctatgctcatgcccacacagacaaaaaaacaaaacgaaatacacacagaaaaaagtctttccaaactgtttaagtatttaaacatctgagccaaagcagatagaagttattgtataattgttaatcactttgcaaataggggctatcagattacctatattggcattgctggattataaactctatatctgtaatataaagngtttgagtttttaattgggctgttatgatcagtagttgattttgagaaagctctatgagctctaagtaactgcatggttttttgttttaatgtaatatagggagacccttcacatt

SEQ ID NO: 707 - DNA, 385 bp, Homo sapiens
  misc_feature 294, 298, 338, 376: n = A,T,C or G
acccagccttgctctcattcccaggacaggaacaggagagcagtgcacctcccaggatgactagggcagaccctgcccagccaataaagatggcagggccaaactcatacttaatgttggtagggatcaaagggttataaaagtctgtgacaatctgatggccataccaggagcaagctaccaaggcggcaagacctgccacgatgaaaattatgcctccacccatggctatacgggccttcttcactttgtcgtctcccccacagcgcgtgcacttcatgcccatcgtggccncaancatggccaggaagcccagcaccaggggagaccaccattanggctcgagtggcctgcaaggccgcggacagggcgagcnccgagtcgt

SEQ ID NO: 708 - DNA, 390 bp, Homo sapiens
  misc_feature 163, 164, 358, 363: n = A,T,C or G
acagcattctggaataaagcaagagtgttcattcacacacacagtagcttcaaaactgttcgatctgtttgttcccatgtagttttctaaagatggaaaaaaaggactttggtcatcaagactactgtggccatattagattactggaacatctaagcatcanntgtgtgaccatgcgaacaaaagacttcggggagtgtctatttttaaaaaggtttatgtgtgtcgaggcagttgtaaaagatttactgcagaatcaagcccacttttaggcttaggaccaggttctaactatctaaaaatattggctgataacaaaaagtgttctaaatgtggctattctgatccatagttgttnttttnaagaaaaaaatgtatatacagaacctg

SEQ ID NO: 709 - DNA, 551 bp, Homo sapiens
actatgctaggtataggtaaccactcttcacttttcttctttcttcaataagaagatttggctaatccttgcaacgtattagaaaaatactcttttccagctaattagaagcctcctccgtggcaaggcgacaggcagaaccagttggctgacctaaccacctgtgcacccaaagtggcgagtctgggtttggagttgcaggagaaagacacttaggcattggaagggtttttacatatggccttgttttttccccaagtataaatgaggaatttggtgatgtgaaattgagtccaaaatgaaacgaaaacataaacccatgaagaaaatgcaacccaccactcttcaaatttatgacatttaaaaatcccctctccccattaatataaaatagccaggggttggggggaaaaagctccctatggttttattcaccataaccttagtgtttctcaattggaacttgttcgtgggaacactgatttgtgtttgaggaaactatttggtttgcaaaacaacaagcaaaatttcttacttcactagtatcctat

SEQ ID NO: 710 - DNA, 307 bp, Homo sapiens
acagataaattacataattaacttttttgtctattaacaatttccttaaatatttctgggattaatatatcatttcatgttacaactgcagaaatatgaattaccatatcagtctttaaaaatgccgaattctatagggcccagtagtatactttacattttgtaatttttaaaattcagtgtatttacaggtctctaaatgaatcactttagaatgcttgatttcactcttggtaaatagaatgattacctgtattttatatatgcaactgtttacaaccaaaataagattgatttagaacaaagt

SEQ ID NO: 711 - DNA, 544 bp, Homo sapiens
  misc_feature 517: n = A,T,C or G
accacagcaaaacaacttcagtgactgtggtgtatatgtattgcagtatgtagagagcttttttgagaatccaattctcagttttgaactacctatgaatttggcaaactggtttcctccaccaagaatgagaacaaaaagagaagaaatccgaaacataattctgaagctacaggaagatcagagcaaagagaaaagaaagcataaggacacttactcaacagaagcacctttaggcgaaggaacagaacaatatgtcaatagtatctcagattgaccatttctgttacttgtcatttctactttcagaaactaaatgactttcaaatttgggtatagacaataaagaactgaagtgcccactactcagtgatttggaaattttgatgcttgtataaatgtcagataattaatttccaaaggcgtatgtattaagtaaaagtctgtaaatatgttaatgaggccaatttttccagcatttataattatttttttcacttgttaggaagctttttgntatgtattttctgttaatagtacctgc

SEQ ID NO: 712 - DNA, 505 bp, Homo sapiens
  misc_feature 445, 471: n = A,T,C or G
acacccatggaacaacttatatctttagtaaacaagtgcaacattattgtcagttattttgcatgtttaaatattatagtctgattatttgtaaacaaacaaaaccccaaatactctaaattctattttaaaaatctgtcaacccacaattattctaatatgctttacttactcgaacacaaatttctgaaaggtgcatatattaccttagataataaggtttagaaatgagtgcttcacactatgaaatgtgcatttccgataagtgatttatgcagcataaagtttagatcaagaaattacaaatcctggatccccacagttcatttagaaaatgcctcaaagttatggctcttgcagcaggtttaacagattaaacattaagtgttctagctccctctatttcaagtatcaaagaaatatgaggctcaaaatctctctaggnttgtaactgataatgcaaaagcattngaaaacagttaaatgtgttttgaaatacagtatt

SEQ ID NO: 713 - DNA, 177 bp, Homo sapiens
  misc_feature 13, 80, 156, 157: n = A,T,C or G
aaaatagataaanatatttttttcaggaaatagtgtggtgtttccagtttgatgttgctgggtggttgagtgagtgaatnttcatgtggctgggtgggtttttgcctttttctcttgccctgttcctggtgccttctgatggggctggaatagttnnggtggatggttctacccttt

SEQ ID NO: 714 - DNA, 306 bp, Homo sapiens
  misc_feature 36, 108, 177, 200, 218, 284: n = A,T,C or G
acaagcttttttttttttttttttttttttttttanctctagagggggtgctatagggtaaatacgggccctatttcaaagatttttaggggaattaattctaggacnatgggcatgaaactgtggtttgctccacagatttcagagcattgaccgtagtatacccccggtcgtgtngcggtgaaagtggtttggtttanacgtccgggaattgcatntgtttttaagcctaatgtggggacagctcatgagtgcaagacgtcttgtgatgtaattattatacnaatgggggcttcaatcgggagt

SEQ ID NO: 715 - DNA, 297 bp, Homo sapiens
  misc_feature 70, 71: n = A,T,C or G
atcataatggctattcctagttttattgctatagccattatgattattaatgatgagtattgattggtannattggttatggtctcattgtccggagagtatattgttgaagaggatagctattagaaggattatggatgcggttgcttgcgtgaggaaatacttgatggcagcttctgtggaacgagggtttattttttggttagaactggaataaaagctagcatgtttatttctaggcctactcaggtaaaaaatcagtgcgagcttagcgctgtgatgagtgtgcctgcaaag

SEQ ID NO: 716 - DNA, 439 bp, Homo sapiens
acactgttaagaagttgagcttttatcttagaggcagcagaaggtttggagccaaggaatgaaatgatgaggcgtccttcaggtaatgaacttcagctgcagtgtgaaaggggcaggaagactggcagctgtcaaaactggaacagtccagtgagtatgtgcaggcccgggcttgggcagtgacgagggcagggagcacacatcaatttctgcggtagaaccttctagaggaagaccagacagagggtcaacagagttgaaaggagaaaataattgaggatgaggtccaagtttttagtttcagagactaggcatatggttaatatttaggtaggaaattcaggaaaaggagcttgtggggcaggaagggaaggaacggcagcttggggcactctgacatctttaacaagtcttgtaaaggcttactaaatacaacgaa

SEQ ID NO: 717 - DNA, 430 bp, Homo sapiens
gctaaggcaaaatacagatgaacatgcacgagtaatgtcttggtgggattatggctatcagatagctggaatggctaatagaactacgttggtggataataacacctggaataacagccacatagcactggtgggaaaagctatgtcttctaatgaaacagcagcctataaaatcatgaggactctagatgtagattatgttttggttatttttggaggggttattggctattctggtgatgatatcaacaaatttctctggatggttaggatagctgaaggagaacatcccaaagacattcgggaaagtgactattttaccccacagggagaattccgtgtagacaaagcaggatcccctactttgttgaattgccttatgtataaaatgtcatactacagatttggagaaatgcagctggattttcgt

SEQ ID NO: 718 - DNA, 174 bp, Homo sapiens
  misc_feature 124, 125, 134, 135: n = A,T,C or G
acacagcatgccgccatggcagcaaagctggaatcagtgagatgtttgaggggcatcaaggaccaatcactggcatccattgtcatgcagctgttggagcagtagacttctcacatctttttgnnacttcatcnnttgactggacagtaaagctttggacaactaagaataaca

SEQ ID NO: 719 - DNA, 589 bp, Homo sapiens
  misc_feature 520, 555, 556, 561: n = A,T,C or G
actcactatgtccagcactgtgctggcagggatagaaatatatcccttgacaaccgaatcttttttgggggttagggggtgattaaaaacttcatacatgaaacaatgaaggattaaaagacagtatacaatcaagtgctaacttgtggagaaatgcatttaggagtgcgatagtgctttagggatttcaagaagggagagatgtatttggagttgttgttgccatttcagtagaactgatctcagggatgaggacagaaccatctacatttgttgcagtcctttggaactgtagactggtgcacataccctctctttcgggaagagatagaaatctttggtttgatactgattagcacagtcctagatttctacagctttggtaggctaccagtgatcatatatacaacttatcgtatatataactaccttgagcagcatgtcccaatgtcgtttttgttttcactgtccctcttttttgagaaataagcaggatgttggccaaagtagggcttgtttncagcaagtagcatcctaacctccgtatcactttcnnggagncaatcttgatctttcaactattatgttg

SEQ ID NO: 720 - DNA, 472 bp, Homo sapiens
  misc_feature 188, 436, 446: n = A,T,C or G
gctatgaacaccacaacagaagagattttttactattatgacacaaacacagggaaagagggcaaactagacattgtaatgcataagatgcaggaaaaagtgcagagcattaactataacccttttgaccagaaactttatgtctataacgatggttaccttctgaattatgatctttctgtcttgcngaagccccagtaagctgtttaggagttagggtgaaagagaaaatgtttgttgaaaaaatagtcttctccacttacttagatatctgcaggggtgtctaaaagtgtgttcattttgcagcaatgtttaggtgcatagttctaccacactagagatctaggacatttgtcttgatttggtgagttctcttgggaatcatctgcctcttcaggcgcattttgcaataaagtctgtctagggtgggattgtnagaggtctangggcactgtgggcctagttgaagcct

SEQ ID NO: 721 - DNA, 292 bp, Homo sapiens
  misc_feature 11: n = A,T,C or G
acttgctacancccctgacaaaaaaaagcagaaattgctagaagaaaacgttagtgctttcaaaacagaatatgatgctgtggctgagaaagctggtaaagtagaagctgaggttaaacgcttacacaataccatcgtagaaatcaataatcataaactcaaggcccaacaagacaaacttgataaaataaataagcaattagatgaatgtgcttctgctattactaaagcccaagtagcaatcaagactgctgacagaaaccttcaaaaggcacaagactctgtcttgcgt

SEQ ID NO: 722 - DNA, 400 bp, Homo sapiens
attggagtgctggttggggttgctctgatatagcagccctggtgtagtttcttcatttcaggaagactgacagttgttttgcttcttccttaaagcatttgcaacagctacagtctaaaattgcttctttaccaaggatatttacagaaaagactctgaccagagatcgagaccatcctagccaacatcgtgaaaccccatctctactaaaaatacaaaaatgagctgggcttggtggcgcgcacctgtagtcccagttactcgggaggctgaggcaggagaatcgcttgaacccgggaggtggagattgcagtgagcccagatcgcaccactgcactccagtctggcaacagagcaagactccatctcaaaaagaaaagaaaagaagactctgacctgt

SEQ ID NO: 723 - DNA, 195 bp, Homo sapiens; identical to SEQ ID NO: 8

SEQ ID NO: 724 - DNA, 538 bp, Homo sapiens
  misc_feature 493: n = A,T,C or G
acctgaagatttaagagatttttggtagttgctggcatggtccctcgacacttaaagtttatatcacaaaaacaaaactaggttggtttcagctctttagtcctttgttaaaaaccataaatcaaatttggttatttaaaagtgaccttaaaaagtttaaaggaaaatatatatattctatcttcccaataagaaacagatttcatatttatacttaaatggcaaataaatatattttaaagccaagcaagttcctctcctctatacaggctaagaaaacagagttattatatctttattgctgatgatcacatcactcatcaagaactagtttcacaattttaggagacttttttcatgacataatataaaagataagggtctaacttaagtctgagcaggcagaatagagctgtgctcccaacatccctatcacaaacatatgacgaatgaacaacaaaacaactgaatctgtttacatcataaccattgnctatgtgatacacaactgcttgcttttctatgggttaataccacc

SEQ ID NO: 725 - DNA, 563 bp, Homo sapiens
acgtatttatgtcctttggtgccttgcacagtaaggcactgttaatgacgtagcagaatagaggaaatgcccacagcaaatagttctagtgacaatttactagacaagttacagtttaataatggtggtggtgattgtttctttcattttattattattatttttttacaataagggtgtagcctttatactccacacacacaaaataaaacaagttacagtttaataatggtggtggtgattgtttctttcattttattattattatttttttacaataagggtgtagcctttatactccacacacacaaaataaaaacaagtgcttattacgaaaagagtccctgcccccaccccccagaacatcctgaacatagcaattcaacagaacagaaaattcaaggcgtttgatttcaaaatttcaataaaaaagcaaaagtatgtaatgcaacagctgttcaacttccaactctaaacaggcaccattaaacaaaaaaccccagtattttaaatttctccagcacacattccaggatcaatgctctgaactgtaatcagctagt

SEQ ID NO: 726 - DNA, 195 bp, Homo sapiens; identical to SEQ ID NO: 8

SEQ ID NO: 727 - DNA, 323 bp, Homo sapiens
accagactgggacattcctcacatcaaagaacttttaccagaaatgactgtgattcccaagctagcctcaatcatacctctctagtgccctctacggaaaatttttaggaaaactatcttgggaatgtatttttccagtcccagagagtgttaaattggtgagtttggaattcttaggatgctttttctttttaatgagggacaaataaatgccacatatttaaccgtggttaactaggaactgcttgactttgagtttcttttttgttttcttctaaataaaacctggttaaaaaaggagtgctttttcgttgtgcacaagt

SEQ ID NO: 728 - DNA, 320 bp, Homo sapiens
actttggaattcttagtcacaaaatatattttgtttacaaaaatttctgtaaaacaggttataacagtgtttaaagtctcagtttcttgcttggggaacttgtgtccctaatgtgtttagattgctagattgctaaggagctgatactttgacagtgtttttagacctgtgttactaaaaaaaagatgaatgtcctgaaaagggtgttgggagggtggttcaacaaagaaacaaagatgttatggtgtttagatttatggttgttaaaaatgtcatctcaagtcaagtcactggtctgtttgcatttgatacatttttgt

SEQ ID NO: 729 - DNA, 276 bp, Homo sapiens
cacaaaagtatattttatcaaattgctgtaagctgtggatagcttaaaagaaaaaaagtttcctgaaatctgggaaacaagacatttaaagaatcagcaaaatttcaaataaaaaattatgaaaatattatcctcattagttcatttagtcccatgaaattaattattttctctgcttgatcttggtggacagtttcatgaagctgtcagttagttcattaaagttttggaaattctcagacagtgcagtggtatcagaaacttgtattcaagagt

SEQ ID NO: 730 - DNA, 195 bp, Homo sapiens
accattggtggccaattgatttgatggtaagggagggatcgttgacctcgtctgttatgtaaaggatgcgtagggatgggagggcgatgaggactaggatgatggcgggcaggatagttcagacggtttctatttcctgagcgtctgagatgttagtattagttagttttgtcgtgagtgttaggaaaagggcgt

SEQ ID NO: 731 - DNA, 317 bp, Homo sapiens
actctgccttttacgagatgaggtaagacatatacatagatggcttttactagccaaggcaatgtaaatggactaagattctcatgtgacttgaggttatctgatgaatttattctcttcaaaaccacctacttttagagggcatgtttaacccctctctttatttaaggagggagagaaaaacacatgttaccagaattcagagtgggttactcaacctaagagaacatacggagttctctttgggaaaacgacaagactacagtgttcacttcgcaccatgaagtggcactcctgttatggctgtcagagtcctc

SEQ ID NO: 732 - DNA, 354 bp, Homo sapiens
  misc_feature 180: n = A,T,C or G
acttatcagaagcctacttcaggaagacagggaagcgatccaaggccaatatcattttcaacacttctcttggagccattttcggggttaagaagtatgcagatgccctgcaggagatcatccaggagcggaacctcactgttaactacaagaaaaacctcattgaagtccgagccgatnaacaagaggctgtatttgagaacctggacaaaccaggagagacccaagtgatttcatatgaaatccttcatgtcacacctccaatgagcccaccagatgtcctcaagaccagtcctgtggctgatgctgctggttgggtggatgtggataaagaaactctgcaacacaggaggt

SEQ ID NO: 733 - DNA, 312 bp, Homo sapiens
  misc_feature 94, 95: n = A,T,C or G
acaaaaatagcaattaatttgtaaacactgccagaatactttctagctgctttgtaattttttaagagtgttattttgtttttgtttttctgtnnctttgtatgtggctcttgttttcatttttgttgtatgtgtagatctgtaaataaaattgcagtatttaaagcttaagctttcaggaaaaagaaaataagaattcagtgtgtgcatgacaactcgtgtgtatgagaaggagggatatgaaggaagatggcttgcagagtaagtcgggtggcaattgtcagggtgtgggaatttcttttcctacggggt

SEQ ID NO: 734 - DNA, 546 bp, Homo sapiens
  misc_feature 14: n = A,T,C or G
acagctaggctcancagcaaaagtgaagaataagaatgaaaggtgaaaagctgacagatgccacgcagagcaaggacttccatgaaggtccgtgtcctgtgtgccaaacacagtcaacattccatcattttctcattgctcttaaacgagcaaaaccaaattctttttctatttaaagaaatattaaatctttattttccccaacataatttgtgatcaggtaaggcaaagataagtccaccatcactggggacagcagcaacatacagacttcagaaatagccctgaatcatcagtaacattctatcgtggtaacatcagaaggaatgcagctaacaaattaaatttgtaatgttgtcacattattctaatttatttgattagtttatctggaaaaactttataaatacattatgtaagagggcagtaaattattttcttgctttgaaaaaataatgttttttcacattttaaaacattttagtctgcttttgcaaaaggagttgcaagaaaaatgtgacagctgggtttgcagaatgtccatgt

SEQ ID NO: 735 - DNA, 469 bp, Homo sapiens
  misc_feature 183, 184: n = A,T,C or G
acctgtgggtttattacctatgggtttatatcctcaaatacgacattctagtcaaagtcttggtaatataaccaatgttttcaaatgtattctgtcatacaaagagcagatttttattgaacttgtgcaataactatattaccatacaatataaatattcatgaatagtttcccaagtctggnncgaccacatagggagaaaatgtaaatgtctcaatttttgttcacaaaagtatattttatcaaattgctgtaagctgtggatagcttaaaagaaaaaaagtttcctgaaatctgggaaacaagacatttaaagaatcagcaaaatttcaaataaaaaattatgaaaatattatcctcattagttcatttagtcccatgaaattaattattttctctgcttgatcttgggtggacagtttcatgaagctgtcagttagttcattaaagttttggaaattctcagaca

SEQ ID NO: 736 - DNA, 275 bp, Homo sapiens
  misc_feature 16, 17, 18, 160: n = A,T,C or G
ccccagttcatggtannntgttacagcaatcctaggaagctaatactctgacagaaaaaatcttggataatatgcatgagaaaaatccttcaataaacacaaaattggtttcaaaatgttttcatgtaaaaataaattaacttttctgtaattagattgngttttatagtaattcttgcctgcttcttagtctttgttgtaggatgcataataaaatacatgaatgagttttaaatggttagctttggagaatggttttgggaagttcctacagt

SEQ ID NO: 737 - DNA, 363 bp, Homo sapiens
acaccctgcccccatcccaggaggagatgaccaagaaccaggtcagcctgacctgcctggtcaaaggcttctaccccagcgacatcgccgtggagtgggagagcaatgggcagccggagaacaactacaagaccacgcctcccgtgctggactccgacggctccttcttcctctacagcaggctaaccgtggacaagagcaggtggcaggaggggaatgtcttctcatgctccgtgatgcatgaggctctgcacaaccactacacacagaagagcctctccctgtctctgggtaaatgagtgccagggccggcaagcccccgctccccgggctctcggggtcgcgcgaggatgcttggcacgt

SEQ ID NO: 738 - DNA, 130 bp, Homo sapiens
  misc_feature 97: n = A,T,C or G
gcttttttttttttttttttttttttttttttaagctttaaaaaaatctttattctttcaatttaaaataatgaatcaagtgcctgctatgtgttanatattatattacatcttaggaattcaaagtggt

SEQ ID NO: 739 - DNA, 195 bp, Homo sapiens; identical to SEQ ID NO: 8

SEQ ID NO: 740 - DNA, 241 bp, Homo sapiens
accctgactgcactacagtggtttatctatgactccgtgaaggtctacttcagacttcctcgccctcctccacccgagatgccagagtctctgaagaagaagcttgggttaactcagtagttagatcaaagcaaatgtggactgaatctgcttgttgatcagtgttgaagaaagtgcaaaaggaacttttatatatttgacagtgtaggaaattgtctattcctgatataattactgtagt

SEQ ID NO: 741 - DNA, 416 bp, Homo sapiens
acatttttgttacagacagaaggctgattttggaaagaaagaaacaataggatgtatagtgctttctatcagcagactagtatgtttaaaaatagtctcatcaagggttctgaataagaaatataaatgttgccaggcagtcccaaactcacatttgatattaactgcagactcatttaaaactgaaaactgctccagcctctctcaatctttactaaggactgggagattatcaaaccctttcaagtctaataatgcttttgaattaagattattgaaaaaaggaatctctgttacagtgcaaagaacattttgatagaaattcatgtctacaaaggagttaaatacagatgtcccttacattagcagatactattcttgctctaaaaaggtagaattatcaagacattgtaaat

SEQ ID NO: 742 - DNA, 235 bp, Homo sapiens
  misc_feature 13, 14, 15, 166, 184, 187: n = A,T,C or G
ttttttttttttnnntttggctctagagggggtgctatagggtaaatacgggccctatttcaaagatttttaggggaattaattctaggacgatgggcatgaaactgtggtttgctccacagatttcagagcattgaccgtagtatacccccggtcgtgtagcggngaaagtggtttggtttanacntccgggaattgcatctgtttttaagcctaatgtggggacagctcatga

SEQ ID NO: 743 - DNA, 225 bp, Homo sapiens
acgttctaattgagagcattccagtagtatcaaacaataatgtctactgtttatagtccacttaataaaaatagaggcatttactatttgccttaggctgataggaatgtgggttttcttgaccaaatatatcagcatctaattgaaatgaccaaatagcattcttagacttctgtattatgaatataattgatatttaaattaatgtcttgttcacatatgtgt

SEQ ID NO: 744 - DNA, 283 bp, Homo sapiens
  misc_feature 280: n = A,T,C or G
gtaatttttgcctttgtttaagcctggaacttgtaagaaaatgaaaatttaatttttttttctaggacgagctatagaaaagctattgagagtatctagttaatcagtgcagtagttggaaaccttgctggtgtatgtgatgtgcttctgtgcttttgaatgactttatcatctagtctttgtctatttttcctttgatgttcaagtcctagtctataggattggcagtttaaatgctttactcccccttttaaaataaatgattaaaatgtgctttaanaaa

SEQ ID NO: 745 - DNA, 351 bp, Homo sapiens
  misc_feature 13: n = A,T,C or G
accctagtaacangtcatatcacgatcaataaatgatcacagcctttcgaaaaaactactgagattggagaatgggtttctgtctccaacccctgaaagacgttgctgcttcaagacctacagctccaagaagacaactcagaatttcttacttttaaaaaaatattgtcatgaataactgaataattagatttctaggaaaatgaggcttttaaattaagatttagcaaaatcaactataatgtatttacttctactcattgatgaatgacagaaatcagttaaagttttacatacaaaagatataaatactgcataatacgtagtgaatattggtacaaaccctttcgt

SEQ ID NO: 746 - DNA, 453 bp, Homo sapiens
  misc_feature 15, 339, 340, 421: n = A,T,C or G
acctgtgggtttatnacctatgggtttatatcctcaaatacgacattctagtcaaagtcttggtaatataaccaatgttttcaaatgtattctgtcatacaaagagcagatttttattgaacttgtgcaataactatattaccatacaatataaatattcatgaatagtttcccaagtctggagcgaccacatagggagaaaatgtaaatgtctcaatttttgttcacaaaagtatattttatcaaattgctgtaagctgtggatagcttaaaagaaaaaaaaaagtttcctgaaatctgggaaacaagacatttaaagaatcagcaaaatttcaaatnnaaaattatgaaaatattatcctcattagttcatttagtcccatgaaattaattattttctctgcttgatcttggttggacngtttcatgaagctgtcagttagttcattaaag

SEQ ID NO: 747 - DNA, 442 bp, Homo sapiens
  misc_feature 255, 287: n = A,T,C or G
gcctgtgggtttattacctatgggtttatatcctcaaatacgacattctagtcaaagtcttggtaatataaccaatgttttcaaatgtattctgtcatacaaagagcagatttttattgaacttgtgcaataactatattaccatacaatataaatattcatgaatagtttcccaagtctggagcgaccacatagggagaaaatgtaaatgtctcaatttttgttcacaaaagtatattttatcaaattgctgtnagctgtggatagcttaaaagaaaaaaagtttnctgaaatctgggaaacaagacatttaaagaatcagcaaaaattttcaaataaaaaattatgaaaatattatcctcattagttcatttagtcccatgaaattaatttatttttctctggcttgatcttggtggacaggtttccatgaaggctgtca

SEQ ID NO: 748 - DNA, 399 bp, Homo sapiens
acatttaaggcttttaaatgtggaaaaaaaattaaaaccaaagaacccccaaatccaaacccctaaccaacacaagtagtatagcaatgttaagcatctcctatttctgatgcttatttggcgcaacttccagtgtcaaaacccaaataattcctaaactaaaaagattagtttagtgaaattttaattacataaattcttcaaagcataaacttggaatttttgtcttggaaatgttataaaatttttaatagcaaaacataggaataaaaacatattaacaaaatgtattcaatcatttacattacaaacaaggaatctgcagttcattgttgtggcctgacaaaagaaatcatatctaccattaagaatctatgcacaatgtgattgcaaatatgt

SEQ ID NO: 749 - DNA, 441 bp, Homo sapiens
  misc_feature 16, 17, 332: n = A,T,C or G
actggggttcttttannccccgtaggtctgtagaatattttaaaaggctagaattacctcaaaaatagtcttgaaataatactgagtccttctaaagagctcactggatattttaataacatttacagaaagacaaaatttgcagtagctgagtttaagtgaagaataatgtagaactaacgtgggctaaaatgtttcataattaacgtcaaaaattgccaagattattaatatatattttggtaatcactattgaccaggttaatttttttgtgcaaaatacactatgtattaatagaacaggaaaataattatttcagaccactaacaanaagaaaacccacagcaagagaagcatctgtagggcaattaaacgttagggaagtttactagctttagaatacatcaatatacttcgataaacaaggagtgttttaatgt

SEQ ID NO: 750 - DNA, 175 bp, Homo sapiens
  misc_feature 147: n = A,T,C or G
actgtctgggtatcggaaagcaagcctacgttgctcactattacgtataatccttttcttttcaagatgcctgaggaagtgcaccatggagaggaggaggtggagacttttgcctttcaggcagaaattgcccaactcatgtccctnatcatcaataccttctattccaacaagg

SEQ ID NO: 751 - DNA, 547 bp, Homo sapiens
  misc_feature 17, 18, 209, 212, 213, 222, 223, 246, 297, 337, 350, 352,357, 377, 379, 380, 409, 472, 473, 534: n = A,T,C or G
ttgataaggaattctcnnaccgataggatgtctgtctgggctttgctgcgggacagtctaactgtgggggctaggggaaagcaggagagtatcgatcaaagagtaagccacacacggataatcagttactagggatggaggtgtgagggttcattatattattcattttactgttgtatatgtttgaaaatgtctataataaaaagctntannaaaaaaaanngaaacaaaaatagttcaggccancaatgggccctccatgttcagtggattttatccttgtttcaattggggtangagttccaggaggtgtggattggaggttgtctaaagaatngaactggcctttntncctgnttcctgggagggagactttnannccttgacatttccagggtaataggagtgnctttgttatttgtgaggccatgggatcacacctgagcttatgctaaaaggtgggatgactcannagctggggctggtcaccagacagactgaccatgtgattagaggtttgaggctttgagtcancctgacctatggg

SEQ ID NO: 752 - DNA, 222 bp, Homo sapiens
accccagtcgtatcctctgtccgcatgtgtggccaggcctgacaaacacctgcagatggctgctgccccaacctgggacctgcccaggaggttggagcagaaagggctctccctggggtggtgtttctcctctagggtattgggatgcatgttctgcactgccagcagagagggtgtgtctgggggccaccacctatgggacacggggtcgaaggggcctgt

SEQ ID NO: 753 - DNA, 578 bp, Homo sapiens
  misc_feature 36, 37, 511, 526, 550, 576: n = A,T,C or G
acatgtcttccatgtatcttttgaactggcaattgnntatttatcttttatttttttaagtcagtatggtctaacactggcatgttcaaagccacattatttctagtccaaaattacaagtaatcaagggtcattatgagttaggcattaatgtttctatctgattttgtgcaaaagcttcaaattaaaacagctgcattagaaaaagaggcgcttctcccctcccctacacctaaaggtgtatttaaactatcttgtgtgattaacttatttagagatgctgtaacttaaaataggggatatttaaggtagcttcagctagcttttaggaaaatcactttgtctaactcagaattatttttaaaaagaaatctggtcttgttagaaaacaaaattttattttgtgctcatttaagtttcaaacttactattttgacagttattttgataacaatgacactagaaaacttgactccatttcatcattgtttctgcatgaatatcatacaantcagttagtttttangtcaagggcttactatttctgggntcttttgctactaaggttcacattanaa

SEQ ID NO: 754 - DNA, 306 bp, Homo sapiens
acacaatggtttattaaaggaatgtatggcccacatcaacctagcaaggattctactggtaaaccttcccatggccaaaggaaaaacaagcaggagttgagtggctggggtggggtgcaggcaatggagagagggcagaagggtgtagaagctgaagggggctagaagcttactcctgagtttcttccttctgtcttcaaatctttacttcttatggccaaagacccagctgtttcataggctggagatgcactcttctagactgctcaagacagccagagacaggggaggagggaagaaggatac

SEQ ID NO: 755 - DNA, 281 bp, Homo sapiens
  misc_feature 18: n = A,T,C or G
acactttccaacaggcanaccctaccaggaactgggagacaagagcgggctctctcctgagataagacaagtttaacgtgaagaccttttggaaaattcccgggttttcctggctcttttcagttggtgtttctctgaggaatagggaggttctcatgaagatattttaaacttccatgctctgagaaatctgagaccacgtggtccttccctcgcagcagccacttagtagtaagcagtccctcaagtcctactggtccccgggcgtggattctcgatgt

SEQ ID NO: 756 - DNA, 205 bp, Homo sapiens
acatctctacaatagaatactactcagcaatgaaaaggaacaaactgctgatacacacaacagcatggatgaattacaaaggcattatggtgagtaaaagaggccagtctcaaaagagtatatttagtaggaccaaaactggatttggtagaaatcacatcagtggttgcttctaggagctaggggagacgaagtggaagggggt

SEQ ID NO: 757 - DNA, 490 bp, Homo sapiens
actgaccatcagaattaaaagaaaaggctggtctcagcagctcacacctgtaatcacagcactttgggaggccaaaaggactgcttgagcccaagagttcaagaccagcctgggcaacaaagtgcgaccccatctctacaaaataataatcataatagaaagaaaagaacggcttatgagagcttgggcaatacctgttggaaaggagcgaaggggaaagacttagtgccagcagagaactactacatactaaatcctaaaagcttaatatttccaagttaagcctatattaactgtgagaatgtttaaaatgtaaatgttatactaaaacgtggtatcttaaaactctaaaactattagttcccaagcttctgttctatttcctaactcttaaaaaaaaagaggatttaaaaaactgtattacttctatttttcctgtttttctaattcttctattttaaaaatgacctttacccataataaaccataa

SEQ ID NO: 758 - DNA, 410 bp, Homo sapiens
ccggactcccgtcccggctcatcacccggcctgtggcccactcccaccgccagctggaaccctggggactacgacgtccctcaaaccttgcttctaggagataaaaagaacatccagtcatggataaaaatgagctggttcagaaggccaaactggccgagcaggctgagcgatatgatgacatggcagcctgcatgaagtctgtaactgagcaaggagctgaattatccaatgaggagaggaatcttctctcagttgcttataaaaatgttgtaggagcccgtaggtcatcttggagggtcgtctcaagtattgaacaaaagacggaaggtgctgagaaaaaaacagcagatggctcgagaatacagagagaaaattgagacggagctaagagatatctgcaatgatgt

SEQ ID NO: 759 - DNA, 440 bp, Homo sapiens
  misc_feature 281, 319: n = A,T,C or G
ctttgatttgtgctgagggtcagcttttggctccttcttcctgagacagtggaaacaatgccagctctgtggcttctgccctggggatgggccgggttggggggtgggttggtgaggctttgggtgccactgcctgtgggttgctggcttaaaggacaattctcttcattggtgagagcccaggccattaacacctacacagtgttattgaaagaagagaggtgggggtggaggggaattagtctgccccagctagagggagataaagagggctagttagnttcttggagcagctgcttttgaggagaaaatatatagnctttggacacgaggaagatctagaaaatttatcattgaacatattaatggttatttctttttctttgggatttccagaaaagcctcttaattttatggcttttctcatcgaagtaaatgtt

SEQ ID NO: 760 - DNA, 508 bp, Homo sapiens
acctgtgggtttattacctatgggtttatatcctcaaatacgacattctagtcaaagtcttggtaatataaccaatgttttcaaatgtattctgttatacaaagagcagatttttattgaacttgtgcaataactatattaccatacaatataaatattcatgaatagtttcccaagtctggagcgaccacatagggagaaaatgtaaatgtctcaatttttgttcacaaaagtatattttatcaaattgctgtaagctgtggatagcttaaaagaaaaaaagtttcctgaaatctgggaaacaagacatttaaagaatcagcaaaatttcaaataaaaaattatgaaaatattatcctcattagttcatttagtcccatgaaattaattattttctctgcttgatcttggtggacagtttcatgaagctgtcagttagttcattaaagttttggaaattctcaggacagtgcagtggtatcagaaacttgtattcaagagtacctcg

SEQ ID NO: 761 - DNA, 537 bp, Homo sapiens
  misc_feature 224, 225: n = A,T,C or G
acaccgtcatatctcaaaagttcagtgctggccatcttgcatcaaatgttcttaaggcagtgactggctatcaaccacagtttctgtctccccagttgcaaacacaggatccatgcaacagttctgagaccatacacttagaaaccacaggggatgcggatcaaatgcagaactcccaaattataaaacagtcaggctacactcaaaacaaaacatagaacatnnacaacacacatctcccaaaaaagaagtgcaacgcatgcttgtataaaccaacaataacaaaaaaaccacaataaaaaatgcagagtctcccaaacaagttttcaaatgtattgcagaaggaaaaaaaatgtatatatataaaattaaaaagtctgaaatactagtgcataggtcaattacctaacaccaaggtttcttttctttctgtccaagctctactgcccctctgatactagcagcatgtctacaggctaagaccatagcaggcaaaaaacgttttttcatttgggcatttacaaaattaaattactg

SEQ ID NO: 762 - DNA, 284 bp, Homo sapiens
actaataaatatttatagatgagtgaatgaggaaataattacatcaaaaaggtcagtgacaattgataaatgacaaggaaatatttaattaggtaaaactaaatcattgctctctatactaggatagactttatctacttcatctgttcctaagtcagcatgttagttctggggaaggatcataagaaaggaaatactttttaaaaaaaaatttggaaacatgtaacaaagcaagggtaaaatatatatatatatctatataagtgctgtgactgtaaaagtgt

SEQ ID NO: 763 - DNA, 209 bp, Homo sapiens
accttagtagggcagatataggaaaaacaaattagagcaaaacaaatcctctacaaatccaaggcaggaaaagtggtggcagagtgactcattctcctgtccctcccatcaggtcaaatcaggaggctgcagtgaatgcctgttctttgaatgtgtagcagttgttcctgtaactctttaaaacttggctataggctgtttagcacagt

SEQ ID NO: 764 - DNA, 480 bp, Homo sapiens
  misc_feature 12, 13, 382, 457: n = A,T,C or G
actccatcttanntaaatatgattaatatccactttaattatttgtgatggagatggttagaatagggcatagcagcaggggtctattccactaacattatacctggctgggtgcctgtaatcccagctaccaggtaggctgaggcaggaggatcacttgagaccagttcaagtccagtctatacaacagaaagagacctcatctcttaaccccaacccccaaaaaagactgtctgaatagaattttgatgaaaaattgtaaatttcacatttttatagatttttaaacaccaagcaatgactttaaacagtgattttagtatttccactgcatattcattcctccattctgtttttaattaaaattagccacaatgtttangaaaacaactgtttttccactttaaaaaaaccaactaggcctggtgtggtggctcatgcctgtaatcccacccancactttgggagagaatatctaaa

SEQ ID NO: 765 - DNA, 195 bp, Homo sapiens; identical to SEQ ID NO: 8

SEQ ID NO: 766 - DNA, 411 bp, Homo sapiens
acagctgcccaagggcgttcgtaacgggaatgccgaagcgtgggaaaaagggagcggtggcggaagacggggatgagctcaggacagagccagaggccaagaagagtaagacggccgcaaagaaaaatgacaaagaggcagcaggagagggcccagccctgtatgaggaccccccagatcagaaaacctcacccagtggcaaacctgccacactcaagatctgctcttggaatgtggatgggcttcgagcctggattaagaagaaaggattagattgggtaaaggaagaagccccagatatactgtgccttcaagagaccaaatgttcagagaacaaactaccagctgaacttcaggagctgcctggactctctcatcaatactggtcagctccttcggacaaggaagggt

SEQ ID NO: 767 - DNA, 195 bp, Homo sapiens; identical to SEQ ID NO: 8

SEQ ID NO: 768 - DNA, 178 bp, Homo sapiens
aaaaagtgcagtagaggaaaaagaggagccaaagaatacttcatagaagtgggacctgagttgagctttgaaaggtgatggttgtgtcagaaacagtgttcaaagaacattattaagatccatagtggtgtgtttttatttctaaaattccattggtataattcacacatcacagtct

SEQ ID NO: 769 - DNA, 86 bp, Homo sapiens
  misc_feature 70: n = A,T,C or G
accattggtggccaattgatttgatggtaagggagggatcgttgacctcgtctgttatgtaaaggatgcngtagggatgggagggc

SEQ ID NO: 770 - DNA, 574 bp, Homo sapiens
  misc_feature 510: n = A,T,C or G
acctcttagggtgggagaaatggtgaagagttgttcctacaacttgctaacctagtggacagggtagtagattagcatcatccggatagatgtgaagaggacggctgtttggataataattaaggataaaatttggccagttgacagattctgtttccagcagtttttacagcaacagtggagtgcttcagtattgtgttcctgtaaatttaattttgatccgcaatcatttggtatacaatgctgtttgaagttttgtcctattggaaaagtcttgtgttgcaggggtgcagttaagatctttgtgatgaggaatgggatgggctaattttttgccgttttcttggaattgggggcatggcaaatacagtagggtagtttagttctctacacaggaacatgataaactacacctgttgatgtcaccgtctgtcaatgaatattatagaaggtatgaaggtgtaattaccataataacaaaacaccctgtctttagggctgacctttcgncctttgacctcctcagcctccattcccatcttcgctcagactgcaagtatgtttgtattaatgt

SEQ ID NO: 771 - DNA, 530 bp, Homo sapiens
  misc_feature 494: n = A,T,C or G
acagttatttgtcaagcttagctttgatttcaaaggacacgcttaccttgtctggcataagaattaatgctcatgtctgcagtggttgggtaggtcctgcttaggagaattaaaaaattcctctttccgtttggttgaatgttgcagtcaggaaccccaactcacttggaatgtttttatatgtaatcatttcccttgaagcttatactttataagggaagaaagaattcaggtgatatgggaaaactgcttggcagaccttcatcttctgcctcaactgtaaaccacatgtaaatgcttaatggagactgttttcattcttgtgatatttaacattcagaaaattacttcagctttggaaatactcaggctgtttttattctgcaggtaagtgttttgacttaattactaatattccagaaatttttgaaagcagtaaccttaatttcctatgtatttcattccacttttgcatataggtcaaatagcaatgngtatgcacattctctttagttaaggcaccaattgtt

SEQ ID NO: 772 - DNA, 331 bp, Homo sapiens
atcttggctcccggcaagatggcgccactgcactgcagcctgggtgagagcgagactccgtctcaaaaaaactaaaaaaaataaaaaataaatagagagggatttttttttaagtagctttgtgttttgtggctattgcatctggaagataaaaattgatgtaaagtgttatacacttcttgttgcgcagtagtgctagcggcttcgctgttcggtcctcggaccggcagccgccactggtgttgagctgctaggaagcccctatcggcgagctcgttggagctcgaacccattgtcacccctctgactcaccggcaaaaaaaaaaaaaaa

SEQ ID NO: 773 - DNA, 527 bp, Homo sapiens
acacttttgttacagttacatatatgaatagttagcagaggagaaactcctccgttgttcctacaccaagggaaaaaatgtaaggactgtatagctcatgaagaatattaacatttttctatcacaaaatattgataaaattggaattgtatcaattcatgttatggagcttaacattttagccgaaatattaagataatataaataaggcttttagcttcatatcaagacctatttgaacacttctagaaaagaacattaaaagttttttcctcatttatggtttgatttagtgtagtgcctcaactgttcttaatggtgtcttagtataatgcataattattagaatataattataaggcattacagaattttatgtggatacttgcaaagatatttcagtccaaaacttcaaattacacacccaaatatgtttgttgccttaatctatacttggacaaaggcaacattttaatttttgctaagtcttaactttagccagatggattgaaatttaaaattttcat

SEQ ID NO: 774 - DNA, 295 bp, Homo sapiens
actctgagccttctcctcgggttggtctaggtggatatcttctcctgaccaaaaactgataggagtcaaatattttcacggtcaaagcagcttctgcttttctaccaaggctcttccaaaacttctgggaatggataacgatgttttctggttctacttcaccctgagcacaagggaacctggtccttgaatgaacctgcactcaaaaaatcaaactaaacaccggatagtttagattggcataaatgcaaatcagagtgttgggctttgcttgtatttgctgacatgctatagt

SEQ ID NO: 775 - DNA, 195 bp, Homo sapiens; identical to SEQ ID NO: 8

SEQ ID NO: 776 - DNA, 262 bp, Homo sapiens
  misc_feature 80, 114, 134, 175, 181, 225: n = A,T,C or G
gggcaggtcttttttttttttttttttttttttttttttttactttttttttggccgcaaaccacaagtgtttattgcanaaatctggccaacattccaattgcagggccccancacagggctgggcaggtganatagggaggggtggaggaagtaatctggcccagggcctcanagctgngaaatgatattgggtgccaggctgcaggtgaggcctgtgccatntggttccacattcagggccttcactatgccatcctgt

SEQ ID NO: 777 - DNA, 267 bp, Homo sapiens
actatctgtgaagttacactttttttttttttttaaaggtagagatgtgtgtgtgtgtaggtattaaagatgtgttgttggtttccaaaaaggaacactggaaaataaattttgaatgtttatgttctcagaatcaggttgacagtcccttgctgacatggctttgctttgtgtaaatacagtggatctcaatcttcggggtgtgatgaatagcgaatcatctcaaatccttgagcactcagtctagtgaagatgttgtcattatgt

SEQ ID NO: 778 - DNA, 452 bp, Homo sapiens
  misc_feature 395: n = A,T,C or G
accattcacatcctcaaaaattcccaactcttagaaattatcatatattggcaagttcatatgattcaacctaatagcttctacctcacaggattattgtgagaattaaatgagaaatgcatgaaatgtttggcacacaggctcatagtaagtgctcaataaatggtggatattattattcttaaatgaatcatgtaattattttctatataataatcaaactcaatcccacttatttgcaacttctgtatcaagttttaagtccaatctatttactggaatacaatgatttagcacacattgatttttcccataaacattcatatgcaatgattgctcactaaaatgcaaaaagggtgaggatacaatatgtgtttttattgtttttggatttngcttctttcacttagcatgtttttcgaaagttcatctctgttatagcatgtatcagt

SEQ ID NO: 779 - DNA, 175 bp, Homo sapiens
  misc_feature 142: n = A,T,C or G
caagcttttttttttttttttttttttttttggctctagagggggtgctatagggtaaatacgggccctatttcaaagatttttaggggaattaattctaggacgatgggcatgaaactgtggtttgctccacagatttcanagcattgaccgtagtatacccccggtcgtgtag

SEQ ID NO: 780 - DNA, 152 bp, Homo sapiens
acggatgctacttgtccaatgatggtaaaagggtagcttactggttgtcctccgattcaggttagaatgaggaggtctgcggctaggagtcaataaagtgattggcttagtgggcgaaatgttatgctttgttgtttggatatatggaggat

SEQ ID NO: 781 - DNA, 557 bp, Homo sapiens
  misc_feature 45, 46, 113, 133, 463, 472, 551: n = A,T,C or G
acactgtggtagcatagagtgtggcttgtggcctgtgactttcanngttgtggttaatcttattgctaaaatgcaaacattggctttttttttccccctcaaagtcagcctangtcaggggagcaagctgcanaactgggtaatgtaagttcaaatgatgaggtgatggaagggctctaggacaaggacattccagagcagagggatgtggacagacaagcagaaggttgtctggaggaatccggaggggaagtcctgatgaaagactttgtgtggtccttcataaggctgttgggtgttcagggaaagaaggccgagccatcctactgagctgcacagagagggcatagagcagccctctgggactgagccattagcagtgtgcagactctttgtgtgtagccagagaaaaccatccggagttcctagggcatatttttctgtcctgattgttttgttttgnttttttttnccaccacagaaggtgctgattttaccatatctttttcatcttttcaaaagttttaaaatatagaacatggggtttctcnctaaga

SEQ ID NO: 782 - DNA, 500 bp, Homo sapiens
  misc_feature 446: n = A,T,C or G
actaaaaatatacaagtattgtgctgggtattttggcacctaatcttcctaaatttcttatgtattgataagattctggcatgggaatagatttaacaagtcataactcaatactgcatgatttggggaaaggtcaattgatacaaatgacaagcacattttatatgctgacagcaagaatcttttgccaagtatccaaataggttgactgtaacccaaatacagaggttgccaaatctgtctagcttgaggcctggtaaaactgcctttcaatactcctatggaagcttcattagacttactaagccaacatgttggctaatatgtataacaaattaggccctatctcaagttccacttccagtagcattaggcaccccaattttattgaatgcaacagttgtttctatgaccgttggaatctttgaaacgcagccgcattttangacgatacttctccaaatacagaagttgcttgctgttaaaagctccacgccgct

SEQ ID NO: 783 - DNA, 603 bp, Homo sapiens
  misc_feature 536: n = A,T,C or G
actcctggcagccagctgtggcccgtgaactgacttctaccgtctgtgaagcctcagaccctcgctgcatgccctatagccttgagtcgcagccagagagccagccctgcttgttgtcttggaggccagtgctactggagagattgtgtctttgcttggcctggaaccagatgtttggaggctttatttagcctctcaactctgtggaggaccaggcctgagctggccacgccttatctctagacactgttcctaccagagtgacctgacgtctttggtttggcggcttcaagctgccacactgtcagcctagcagattgtgcaggatgctgaggataaacgaacccaccaggactgcatttcacaagttctggctgggaggaagtgaggacaggcagcttcccggtgctggagacaggtaggcagcgtggcagaggctgtgggacctggaactctttagagaactcgctccggagcattctaggcatgtgggcacctctccttcaccttcgtattccccagtgcctggctccccngtgggaatgggtgagtgagtggtgagcctggttttttgatgagacaagagacgccctgcaaagactg

SEQ ID NO: 784 - DNA, 382 bp, Homo sapiens
acctctttgcatggtgggtgggaaaatagtaaatactgtaaatactttgtgttgcctctgtggtagaaccttgatataaagatctacaaatggacagggcagaggccactaattccttgaccttgaggtgagcctctccccagcgaccaaaatgtgaggacagttaataccttacttgatacaccgtgaaagggacgaaaagtgaccacagcagttctgagacccaggaggcatctgacaccgtctgaggggagggcatgagatgaggcctaagccagggccagggatgggaaatttccccttcaagccccagagattccctgttcaacacacactcaccacagagaccaggggtctctgaacttgcagggtaagaggttgt

SEQ ID NO: 785 - DNA, 394 bp, Homo sapiens
acaagcatctgagtgctttacaaattcaaatgtatttaatccccctatcaacactaggaggtagtttctgttattagcgccattttacaaatgaggaaactgaggtgtagagcagttagattggtgtagagaagctagatcgtgtgctcaaggcttcagtccaggctcttggccctgacacgatgctgtttgcctgttgaagatgtgtgtgcatgcatgcaccattcacactgtgaacgtgtcccagcatggccacaccccctcaccgtatacacatatggccatgagcactcaatctcaaggtcatggatgcacatgcctcacacctatgcatggaaggacactcggcacacatacttgtctctgcacacacacaccacttgcacacccatgt

SEQ ID NO: 786 - DNA, 200 bp, Homo sapiens
caggtaccattggtggccaattgatttgatggtaagggagggatcgttgacctcgtctgttatgtaaaggatgcgtagggatgggagggcgatgaggactaggatgatggcgggcaggatagttcagacggtttctatttcctgagcgtctgagatgttagtattagttagttttgttgtgagtgttaggaaaagggcgt

SEQ ID NO: 787 - DNA, 249 bp, Homo sapiens
acaggagatacggcttatctttgttctcccccatgccacagtaggccccagtagagttcctggggtagaggacttgccgggggtctccatacaaccaggccacaatccccaccacgatgtaacctagaatgaagagcaggaagaggacgcagcagatgacatctgtgcagcttctgttcttgatggggcctcgaaaggaggggtcgtatttgactggcttcccgtaggcctcgtcatcctcgtcccgct

SEQ ID NO: 788 - DNA, 516 bp, Homo sapiens
  misc_feature 407, 435, 452, 469: n = A,T,C or G
aaaaactacacattctcagaagctcttgatgtctctaatgaagggggggaatgctgttaatgagaacagtcataaatttttagcatataattacaagaacagcctgtggatatgatcacttaaatgattttgtggtgattcgtgccattgcttttttatttaaaagaaaattttgtaattaaatgcctttttctaaattatcttctcttggaatcattacttttaatcctatgtgtttatgagtatttttgctttttttttattaatattgagaaatggacttttttgttattaaaagtcacctctattttctattttctttgtaatttttaaagtaggaagatgtcagagatgtaaatatgttttcgtctttagtttttttccttttacaaatttttattcttcangattttcaaaatacagttttagttctgnttcttttgacaatatgntattaattttccaattngcaaaatggtacatggtggttgccgcccgacagcaccgtgttggcgt

SEQ ID NO: 789 - DNA, 179 bp, Homo sapiens
acagtggggaggtggaaggagagtcagaagtcaccaaaatgtataactatccaagctcaagagcagctgggctgagtctccactcacctctttctctgtattactcccataaccattactaatgtgtccactttctttactgacacaggtgctgggactgggggtggtgaaggatatgt

SEQ ID NO: 790 - DNA, 198 bp, Homo sapiens
  misc_feature 16: n = A,T,C or G
gcggcgggctctgganaagattgaccttaagttcattgacaccacctccaagtttggccatggccgcttccagaccatggaggagaagaaagcattcatgggaccactgaagaaagaccgaattgcaaaggaagaaggagcttaatgccaggaacagattttgcagttggtggggtctcaataaaagttattttccac

SEQ ID NO: 791 - DNA, 164 bp, Homo sapiens
acctggccctcttttccattattaatattgttttgttttattgttcattgcagaaattgaagtattaaaatatcttattataataatattgctttctatttgttgctttaattctgtcaatttttgctttgtattttaggaaacctaatatgagaaatatatgt

SEQ ID NO: 792 - DNA, 464 bp, Homo sapiens
  misc_feature 426: n = A,T,C or G
actttggtaaataaaaaataaaatggttcagatgaacacaatccgtggaaagaaacaatctagggggaaggaactatggacatcagacaatggtcacaattctcaccatcgagctccatagataaggcaagacttgctaagtctatggatcacgaccccatggaggtcttaagtatctccagactgaagctagaacaagtatagtgcaattagaaagagagaaagcccctcctccacggatacatccacccctctgtaaaggagactgacgcatgccaacacttctacatgggaaaggggagccccggggtgtgacgtctgactcctggcccttttcttctttcctctgagcttagtgctggtggaggctctggaagaggcactggggaggccaagggcccttcctactatgaaaaatgaactgtnagagtgggaaaatgtgtgaagcctcttaccagtacctc

SEQ ID NO: 793 - DNA, 558 bp, Homo sapiens
  misc_feature 486: n = A,T,C or G
acaggggaatggaatggaatggaatgcaatggaatggaatcatccgtaatggaatggaaaggaatggaatggaatggaatggaatggaatggaatggaatggaatcaactcgattgcaatcgaatggaatggaatggaattaacccgaatagaatggaatggaatggaatggaacggaacggaatggaatggaatggaatggaatggaacggaatggaatggaatggaatggaatggtatcaacgcgagtgcaggggaaaggaaaggaatggaatgcaatggaatggaatcttctggaatggaatggaatggaatggaatggaatgatacggaatagaatggaatggatcgaaatggaatggaatggaatggaatggaatggaatggaatggaatcgttccgagtggaataggagggaatgtattcgagtggaatgaaaggaatggaatcaaccagagtggaatggaagggaatggaatggaatgnaaaataataggaatggaatcaacccgagtgaatggaatggaaaggactggaatggaatggatggatggaatg

SEQ ID NO: 794 - DNA, 271 bp, Homo sapiens
cgcaagtaggtctacaagacgctacttcccctatcatagaagagcttatcacctttcatgatcacgccctcataatcattttccttatctgcttcctagtcctgtatgcccttttcctaacactcacaacaaaacaaaaaaaaaaaaaaaaaaaaaacccgggggctggggaagcaaggaaataagtcatctgtatgctgactggggataatggcatcaaatgtcagtccttgacatttggggggaacagcaggtgccagagctaaaaggt

SEQ ID NO: 795 - DNA, 181 bp, Homo sapiens
cctgtttccattcaacaagagcactacattcatttagctaaacggattccaaagagtagaattgcattgaccgcgactaatttcaaaatgctttttattattattattttttagacagtctcactttgtcgcccaggccggagtgcagtggtgcgatctcagatcagtgtacctgcccgga

SEQ ID NO: 796 - DNA, 497 bp, Homo sapiens
  misc_feature 189, 190, 451, 460, 481: n = A,T,C or G
actttaaaatgtgagtttgagttcttctttgtggaaacttaagatgtggtgtaaatgattctttccaaaattgtccagcagcttgaatgaggcagtgacaattctgaggtggtttattgggagtccttctacatttctcttagataactctgcactctgggtggctattgtgtagccttactgccccanngtgcctgttagccaaatatttcccctctgataggaatattttctaagaatcagctgataacttgcgtgctggaccttgttatctgtgcccctgggagacacacgttttcttggttttgaaaacctgaaacacaggcaactttacattttggggaattagctgatgcctcctgaagcctgaggaggtggcggggaatatgagcggtgctgtctctctcaaaagtgccctttagatgattccccctcctagggctgcctgcangggctgtangcttgggaaagattgtgtaangtgacagtgaatcaga

SEQ ID NO: 797 - DNA, 551 bp, Homo sapiens
accaccagcaatctctgcatttaagtggtcagagagcactcctaataaacttgattctactgggaaaggttcataaagaaattttttataaaagtctttctttatgtcatgaactagaattacagctttgccttggtcatcgaactgcggcctcccagcacgccccatcatctggaggacatctgtaatgggaaaatccacataacgtcttgtttttccatcatagtattctgttcccttaataattactaaatgagctggaaagtttacaccccaggctaatgtgcttgtagcaataagaacctgaactttacagtttacaaatagttcctctactgtttttcggtccctctcatgtagtccagcatgatgcattcctatcccgaaagtaagggtcagcttgaggttggaatctcttactgttgcaatgatgttctccatctctctttcatccatgtttaaccactgctttggatcttcttcagtagccaggaaggcgatcaattccaaagcagtaagacgagtttgacgtcttgatgagacaaatatca

SEQ ID NO: 798 - DNA, 326 bp, Homo sapiens
accagcccaccgggggacagctgctgttggatgggaagccccttccccaatatgagcaccgctacctgcacaggcaggtggctgcagtgggacaagagccacaggtatttggaagaagtcttcaagaaaatattgcctatggcctgacccagaagccaactatggaggaaatcacagctgctgcagtaaagtctggggcccatagtttcatctctggactccctcagggctatgacacagaggtagacgaggctgggagccagctgtcagggggtcagcgacaggcagtggcgttggcccgagcattgatccggaacccgtgtgta

SEQ ID NO: 799 - DNA, 346 bp, Homo sapiens
acctctgcatacagatatattataaaacacaagcaatgttatttatgaaactgtgatgcagtcttcaacatcaagaaaaaatgacaactataataaaatttacaacacagtttcacagtctaaatgctatgttcctttaagtattttcatatttttaatcatttattaagagaaaattgtgaaaagttaatttggccttatagagagattcaggatagatgtagcctatagatgtgtcattttaataagttgggatacatgtttagtttttccttatattcctgttcagtgaacagattttcataattctcacttgttaaagtgctgcaaaaattgcattttcagt

SEQ ID NO: 800 - DNA, 502 bp, Homo sapiens
acctgtgggtttattacctatgggtttatatcctcaaatacgacattctagtcaaagtcttggtaatataaccaatgttttcaaatgtattctgtcatacaaagagcagatttttattgaacttgtgcaataactatattaccatacaatataaatattcatgaatagtttcccaagtctggagcgaccacatagggagaaaatgtaaatgtctcaatttttgttcacaaaagtatattttatcaaattgctgtaagctgtggatagcttaaaagaaaaaaaagtttcctgaaatctgggaaacaagacatttaaagaatcagcaaaatttcaaataaaaaattataaaaatattatcctcattagttcatttagtcccatgaaattaattattttctctgcttgatcttggtggacagtttcatgaagctgtcagttagttcattaaagttttggaaattctcagacagtgcagtggtatcagaaacttgtattcaagagt

SEQ ID NO: 801 - DNA, 537 bp, Homo sapiens
  misc_feature 451: n = A,T,C or G
actgtgatgtccaatctaccacacagggcttcaccaagccaaagcagccacactgaaagaaatctgccaggttctgcatgaatccaagattgtatggtgtcttcctgagggacaacgtctgtttcatatgcttgctctgcttctgcaggctgattctctcatgggaggtcaggcccagaaaggcaatctgaaagagttgatttaataataaaaatgttgaccatgagaaatggaaagttgctagcatcaagatatataaaacccaaggggaacaggccacaatctgattgaggtaagtccataatccatcttctttgaatgttgtggcacaatgactggacaaatagatgaaagatccatatataatccagccacataccatggaaaggaaaaacaagaagaatatgtaatagtgatggttgccaaaacctatgcaccgtccagtccacangcagtgttgatcatatcgagccacacagcagttgcatacatggcaggtggagtgaccttaatggcttccttataaagacatgatgt

SEQ ID NO: 802 - DNA, 399 bp, Homo sapiens
acattacaaatctctgaggccattaggggaaaaggaaggggtgtggtttgtctttgaaattacggttaatacttttagacagtaagtccggctggttgcagggctatttgccccgacagcatcagcctgtaacatttcttctctttcctttgtgccactgagtcgttccctggccagaggacataaatggtgctggtaggaggttatcagagtaaggaaggtagcagatataggtgcagggtgcctgtcattcactgtgttatttggtttaaatcaaagtgattctgggggaagctatgctctttcagtggataataaaattggtaactctattgtaaaacatgtcaatggtgtgtgaagaaaaatcaaccaatctgtaggtgttgataactagacagt

SEQ ID NO: 803 - DNA, 250 bp, Homo sapiens
  misc_feature 176, 177, 223: n = A,T,C or G
actgccaggggacagtgctgtgtcagttgaacctgggctgctgtgggaagttgttgattcctgactggggcctgaggtggtggtgctggcaggtaacagtgttgtatccgttgagcctgggctgctgtgggaagttgtagaatgccgactgaggcctggcgtggtggtgctgtcanngaatgctgttgtgtgcgttgagcctggttcggctgtgggaggtggnggattcttcactgacgcctgagcttgt

SEQ ID NO: 804 - DNA, 451 bp, Homo sapiens
  misc_feature 375, 386, 410, 414, 416, 437: n = A,T,C or G
acaagtcattactcccccttctcccatatgaacaagaattttttaacggtcagaatatattgggcatcaaattaaaaacttttttttcaaaagtctacagaatggatattggagcaaaaattacaaagtgggtcagatacaggtttttaaaaactgcattactgaatttaacaaaagtcagacactagaatcatatatttgctgcataaaagttgatttgatacctggtggtgattgaatttagtctcaaagactcataaataaaaatctgacttaagacgtagtcataccagtataccaattctcccatcactttgactttcggcagagagattagagcaaaaaatattcaggagaacagtggagttacattgnattatgtatgnttaatataatatcaattttaaggntaangntaaggaaatcttaattttaanggtaaaccttgagt

SEQ ID NO: 805 - DNA, 160 bp, Homo sapiens
acattgtatgggcttagacaaatgtatgatgatatctacaattatagaatcatacagaatagtttcactgccctaaaacttctctatgcttcacctgttcatccctttcttccctaatcccctggcaaccactttaaaaaaaaaattaggttcagggggt

SEQ ID NO: 806 - DNA, 276 bp, Homo sapiens
actggcatttctgaatggatgtaagtggagtattttagtctaaaggcttttcaaattacttgaatttttttaaaaattgaggagctttatttctatttacccttccatttttgtatatcaaatttccattgtcattaaaaactgtatcttgaaactttgtgaactgacttgctgtatttgcactttgagctcttgaaataaatgtgatttttgtgtgattatctggtttccagttttaaacattaactgtcaccttttattcttaaacttgaaagt

SEQ ID NO: 807 - DNA, 373 bp, Homo sapiens
ctggaagtcagcttgaaaaacaatgtggtgagtgtcaacaaggagcctgttgccgagcctgacatcatggccacaaatggcgtggtccatgtcatcaccaatgttctgcagcctccagccaacagacctcaggaaagaggggatgaacttgcagactctgcgcttgagatcttcaaacaagcatcagcgttttccagggcttcccagaggtctgtgcgactagcccctgtctatcaaaagttattagagaggatgaagcattagcttgaagcactacaggaggaatgcaccacggcagctctccgccaatttctctcagatttccacagagactgtttgaatgttttcaaaaccaagtatcacactttaatgt

SEQ ID NO: 808 - DNA, 266 bp, Homo sapiens
ggttaggattcggcgctaggaggtgaaggcgttgtgtgagttgaggctgggcgggtctggaaggcagtagattctccctgaagtccagggcttgtggagctggcaggggacagtgttgtgcgtggtgagccagtgctgctgtggacgcgtgtagatgcttcaacgatgcctgagcttgtggtgctgtcagggaagagtgttgtgtgagtggagcctgggttgctgtggaaggttgtagattcttgaccaaaggataaggctgtggt

SEQ ID NO: 809 - DNA, 569 bp, Homo sapiens
  misc_feature 525: n = A,T,C or G
gtgaatgagcggctgatcagcatggcctatgggcagattggaatgatccaggccctgggaggcttctttacttactttgtgattctggctgagaacggcttcctcccaattcacctgttgggcctccgagtgggctgggatgaccgctggatcaacgatgtggaagacagctacgggcagcagtggacctatgagcagaggaaaatcgtggagttcacctgccacacagccttcttcgtcagtatcgtggtggtgcagtgggccgacttggtcatctgtaagaccaggaggaattcggtcttccagcaggggatgaagaacaagatcttgatatttggcctctttgaagagacagccctggctgctttcctttcctactgccctggaatgggtgttgctcttaggatgtatcccctcaaacctacctggtggttctgtgccttcccctactctcttctcatcttcgtatatgacgaagtcagaaaactcatcatcaggcgacgccctggcggctgggtggagaangaaacctactattagccccccgtcctgcacgccgtggagcatca

SEQ ID NO: 810 - DNA, 195 bp, Homo sapiens; identical to SEQ ID NO: 8

SEQ ID NO: 811 - DNA, 298 bp, Homo sapiens
accatcttcttcagaactgcatctaagaggctgtgctggctgggaatcatacagctgtgggcaacaactgcatcagccccaaggcttccctccagaccaaaaggtgattcatggcccctggttaatatcaccctaggttctcccctgtcccagttttaacataatatttcatagaaatactagtgccataaaaagtcaatatttcaaatataaaaattattttatacaaatgtaattcataatcattcttttaaaatacagcattgttatatatgtttgaaacattattaaaataaat

SEQ ID NO: 812 - DNA, 515 bp, Homo sapiens
  misc_feature 448: n = A,T,C or G
acatgtgctaatgttctgtaaatccagaaaatcatatcacataagattcaataaggaattaaagaaatcaaattaatcacacttgtgttaactaaataagaataggtcagatacctgtttccaagttatgctgggtatataaaaagcttctctgcaatcatagaaaagtttgaaaaggttcattgatgaaagcaccttgcatttcagatgaacttcaatattttggggcttttttatataagagctttaacaagtatatatgcacctgtatatttgaatagatattgatgaaaggggccatacaggcctcagagtagtgcaccatcagaaatattttaggggatacagtgtcttttaaatttgaatattcaagtatttaagttctacaaagttatatgatacctcctggatgtttcctagaagttctcatattcatagttagaaacangcttttttaaaaaggaaatgccgagtttctcaaatcaaatttcacataacttagagctctatttctg

SEQ ID NO: 813 - DNA, 329 bp, Homo sapiens
gctaaaaaaggatacaaaatggaattacatataatagaatgctcaggtaaacccgcaaaaggtggaagagtatggaaaacagaaataggaatgaagaacaagggcaaaaagtagaaaatggtaacaaatgtggtagatgttaattcagcaacatcagtaatcacctttttaaattttttttttatttttttgagacagtctcactctgtcccccagggtggagtgcagtggcacagtcccagtctattgaaagctttgacctcccaggctcgagtgatcctcccaccacagcctcccaagtagctgggactacaggcacaagccactgt

SEQ ID NO: 814 - DNA, 280 bp, Homo sapiens
cgagcggccgcccggcaggtactgtcccaagtgccggggggagaacgagaagaccatggacaaagccctggagaaatccaaaaaagagagggcttacaacaggtagtttgtggacaggcgcctggtgtgaggaggacaaaataaaccgtgtatttattacattgctgcctttgttgaggtgcaaggagtgtaaaatgtatatttttaaagaatgttagaaaaggaaccattcctttcatagggatggcagtgattctgtttgccttttgttttcattggt

SEQ ID NO: 815 - DNA, 143 bp, Homo sapiens
  misc_feature 15, 113, 114: n = A,T,C or G
acacgctcatccctnctgtagtgatcatagctgtaggagccctgcttttcatcattgggctaattggctgctgtgccacaatccgggaaagtcgctgtggacttgccacgttnntcatcatcctgctcttggtttttgtcaca

SEQ ID NO: 816 - DNA, 191 bp, Homo sapiens
accgcggccgttaaacatgtgtcactgggcaggcggtgcctctaatactggtgatgctagaggtgatgtttttggtaaacaggcggggtaagatttgccgagttccctttacttttttttaacctttccttatgagcatgcctgtgttgggttgacagtgagggtaataatgacttgttggttgattgtag

SEQ ID NO: 817 - DNA, 553 bp, Homo sapiens
actcactattgctgctagtctcagtttcaaagatccatttgtcattccactgggaaaagaaaagattgcagatgcaagaagaaaggaattggcaaaggatactagaagtgatcacttaacagttgtgaatgcgtttgagggctgggaagaggctaggcgacgtggtttcagatacgaaaaggactattgctgggaatattttctgtcttcaaacacactgcagatgctgcataacatgaaaggacagtttgctgagcatcttcttggagctggatttgtaagcagtagaaatcctaaagatccagaatctaatataaattcagataatgagaagataattaaagctgtcatctgtgctggtttatatcccaaagttgctaaaattcgactaaatttgggtaaaaaaagaaaaatggtaaaagtttacacaaaaaccgatggcctggttgctgttcatcctaaatctgttaatgtggagcaaacagactttcactacaactggcttatctatcacctaaagatgagaacaagcagtatatacttgtatgactgc

SEQ ID NO: 818 - DNA, 291 bp, Homo sapiens
  misc_feature 28, 124, 125, 197: n = A,T,C or G
acacctgagcttccatcttggtcctgtngataggaagtagagggatagaggtggggaaagcactcacactgtctctctcctgtctgtgtggggttgttactgccactgtgtcaccccacacagnntggcagttttccagctgttaggggagtgagatcagcttctctcccccttgtagagtggagcggatcgagcanaatgccaccaacaccttcctggtctacaccgaggaggacttgggagacctcttgaagatccagctcacctgggagggggcctctcagtcttggt

SEQ ID NO: 819 - DNA, 411 bp, Homo sapiens
acggccagggctattggttgaatgagtaggctgatggtttcgataataactagtatggggataaggggtgtaggtgtgccctgtggtaagaagtgggctagggcatttttaatcttagagcgaaagcctataatcactgcgcccgctcataaggggatggccatggctaggtttatagatagttgggtggttggtgtaaatgagtgaggcaggagtccgaggaggttagttgtggcaataaaaatgattaaggatactagtataagagatcaggttcgtcctttagtgttgtgtatggctatcatttgttttgaggttagtttgattagtcattgttgggtggtaattagtcggttgttgatgagatatttggaggtggggatcaatagagggggaaatagaatgatcagt

SEQ ID NO: 820 - DNA, 531 bp, Homo sapiens
ctttgacctttttgagaacaagaagaaaaagaacaacatcaaactctatgtccgccgtgtgttcatcatggacagctgtgatgagttgataccagagtatctcaattttatccgtggtgtggttgactctgaggatctgcccctgaacatctcccgagaaatgctccagcagagcaaaatcttgaaagtcattcgcaaaaacattgttaagaagtgccttgagctcttctctgagctggcagaagacaaggagaattacaagaaattctatgaggcattctctaaaaatctcaagcttggaatccacgaagactccactaaccgccgccgcctgtctgagctgctgcgctatcatacctcccagtctggagatgagatgacatctctgtcagagtatgtttctcgcatgaaggagacacagaagtccatctattacatcactggtgagagcaaagagcaggtggccaactcagcttttgtggagcgagtgcggaaacggggcttcgaggtggtatatatgaccgagcccat

SEQ ID NO: 821 - DNA, 402 bp, Homo sapiens
acgacatgtttgtgaatttcccagaccagccggtggtgtggagagaaatcagcattattacatcagcattaaggaacgattcacaggacaaacaaacccaatttttaagaagtttatttgaaactcttcctggtcgagtccagtgtgaaatgttactaaaggtcacggaacaatgcttcaacacgttagaacgatcagaaatgttgcttctacttttgaggcgcttccctgaaacggtggtgcagcatggggttggccttggggaggcactattagaggctgaaactattgaagaacaagaatctccagtgaactgctttagaaaattatttgtttgtgatgtccttcctctaataattaacaaccatgatgttcgattacctgccaatttattgtataagt

SEQ ID NO: 822 - DNA, 195 bp, Homo sapiens
accattggtggccaattgatttgatggtaagggagggatcgttgacctcgtctgttatgtaaaggatgcgtagggatgggagggcgatgaggactaggatgatggcgggcaggatagttcagacggtttctatttcctgagcgtctgaggtgttagtattagttagttttgttgtgagtgttaggaaaagggcgt

SEQ ID NO: 823 - DNA, 195 bp, Homo sapiens; identical to SEQ ID NO: 8

SEQ ID NO: 824 - DNA, 231 bp, Homo sapiens
  misc_feature 188: n = A,T,C or G
acggatgctacttgtccaatgatggtaaaagggtagcttactggttgtcctccgattcaggttagaatgaggaggtctgcggctaggagtcaataaagtgattggcttagtgggcgaaatattatgctttgttgtttggatatatggaggatggggattattgctaggatgaggatggatagtaatanggcaaggacgcctcctagtttgttagggacggatcggagaaac

SEQ ID NO: 825 - DNA, 431 bp, Homo sapiens
  misc_feature 13, 386: n = A,T,C or G
acaaaaggttganattgggcaaaagagagccagtgaagatacaacttcaggttcaccacccaagaaatcttcagcaggaccaaaaagagatgccaggcagatttataaccctcccagtgggaaatatagcagcaatttgggcaactttaattatgagaggagccttcaggggaagtagaggtggccgaggttggggcacacgaggaaatcgtagtcggggaagactctactgaataagacatcagcattcttcagcattgtcatgagcttaatatacttaaattctactactcattggattgccggggatgtccctttaaacagactgctgccttcagctaaaaacttaatgttctttatacctttgtatgtatgacctacttttngtaacagaccatggttgtgtccaaggtaaaaaccacagtgatatt

SEQ ID NO: 826 - DNA, 346 bp, Homo sapiens
  misc_feature 13, 14: n = A,T,C or G
accagttacccanntgaaaatatggagtaactttgttttgtatggtaaggtttaggaatggtggatggagggtatctctatataaataaagtgctcaacaatgtgcaatgattgtaaatttagtaagatattacagccatttcatgaatgctttaccattcaacatagtatctattacaaaacacctttcctgtatccatatacttcaggtgttgctgttaacatttactatgatatttattttaaccaaaatgttactcacattaaatgtttattctttaaaatgaatgtattatgtttttaacccacaaatgcatacttaccctgtgcctcatatttcaatagt

SEQ ID NO: 827 - DNA, 195 bp, Homo sapiens; identical to SEQ ID NO: 8

SEQ ID NO: 828 - DNA, 251 bp, Homo sapiens
gaaattcttagtgatccagaggttcttgcagccatgcaggatccagaagttatggtggctttccaggatgtggctcagaacccagcaaatatgtcaaaataccagagcaacccaaaggttatgaatctcatcagtaaattgtcagccaaatttggaggtcaagcgtaatgtccttctgataaataaagcccttgctgaaggaaaagcaacctagatcaccttatggatgtcgcaataatacaaaccagtgt

SEQ ID NO: 829 - DNA, 418 bp, Homo sapiens
acagtgatagctccccctgggcaatacaatacaagaacagtgggttttgtcaaattggaacaaggaaacagaaccacagaaataaatacattggttaacatcagattagttcaggttacttttttgtaaaagttaaagtagaggggacttctgtattatgctaactcaagtagactggaatctcctgtgttctttttttttttaaattggttttaattttttttaattggatctatcttcttccttaacatttcagttggagtatgtagcatttagcaccactggctcaatgcgctcacctaggtgagagtgtgaccaaatcttaaagcattagtgctattatcagttaccaccatttggggcttttatccttcatgggttatgatgttctcctgatgacacatttctctgagtttta

SEQ ID NO: 830 - DNA, 520 bp, Homo sapiens
  misc_feature 389, 402: n = A,T,C or G
acaaaactcaaatagatgaacttttaagacaaagtctcagttaacttgtgaaaattgaattcccatcaaactgaatgtaagcatttaatatctaaacatttaatgtggacttccaataaattcttttatagaattagaaagtgggatttactgtagagtgtaaaaatttttttaaaattgttttacactatgtagtaatatttacagttaaattattttgtgcaatatttgaactttatttttgaaactattctttaaagatttattttttaaagcattcattttttttccttgaatagcacagagatttattactttatcctcatataaatatggctagagaagaagaatggtgttcatatatgtattgtagatatacaactagttgnatctataatttgnaagtgtttatatatatattaagaacatttgaagagtaatgttaacatactgaaactttgaaatctttcacatttaaaatttcaacatatcttaattactgctcatgaaaatgtacctc

SEQ ID NO: 831 - DNA, 568 bp, Homo sapiens
acagttcacatgacaagtcgtatttcagttcaaacgtgttggcgcttttcatcaaatttgataagaatatgctgttttctactatgttcataatgaaatgaatggggaagaaaagggactagcctttctctagggaggtagttttgtgcatggctttgcttttatcagttttaatactaggctgaaaagccaaaatgaaaaattttttattatttttatttctatgcatttagagtttcaacatggagattctaaatcctatactgatacattttaaggaagaaatacacaattgcacctttgtataatctttatacatacaatgtaaacatgatgctacagagtaagctgtgttgaaaattaaaacccttcacagaagagtgatgtgtattaagccgtcaggatgccatttaatggcaggcatctccacaggtaggtcaacttctccaggctactagaatgtttcagtggcattcaatcaacccaaagatgtaatgtgtgactcatgaagctttcttttcatggtggaaagctctgctgtcaagtgtttcacagcaaaaatattcag

SEQ ID NO: 832 - DNA, 473 bp, Homo sapiens
acttatttcaacaattcttagagatgctagctagtgttgaagctaaaaatagctttatttatgttgaattgtgatttttttatgccaaattttttttagttctaatcattgatgatagcttggaaataaataattatgccatggcatttgacagttcattattcctataagaattaaattgagtttagagagaatggtggtgttgagctgattattaacagttactgaaatcaaatatttatttgttacattattccatttgtattttaggtttccttttacattctttttatatgcattctgacattacatattttttaagactatggaaataatttaaagatttaagctctggtggatgattatctgctaagtaagtctgaaaatgtaatattttgataatactgtaatatacctgtcacacaaatgcttttctaatgttttaaccttgagtattgcagttgctgctttgt

SEQ ID NO: 833 - DNA, 388 bp, Homo sapiens
actctataaatctagtggaaacatttctgcacaaactagattctggacaccagtgtgcggaaatgcttctgctacatttttagggtttgcctacattttttgggctctggataaggaattaaaggagtgcagcaataactgcactgtctaaaagtttgtgcttattttcttgtaaatttgaatattgcatattgaaatttttgtttatgatctatgaatgtttttctcaaaatttacaaagctttgtaaattagattttctttaataaaatgccatttgtgcaagatttctcaaagattaggtatatatttaaatggaagagaaaatatttttatgggagaaaaatacatttgaaccatgaaatttcatcttttaaataacatccagt

SEQ ID NO: 834 - DNA, 195 bp, Homo sapiens; identical to SEQ ID NO: 8

SEQ ID NO: 835 - DNA, 472 bp, Homo sapiens
actcttggtttgtcaatgggactttccagcaatccacccaagagctctttatccccaacatcactgtgaataatagtggatcctatacgtgccaagcccataactcagacactggcctcaataggaccacagtcacgacgatcacagtctatgcagagccacccaaacccttcatcaccagcaacaactccaaccccatggaggatgaggatgctgtagccttaacctgtgaacctgagattcagaacacaacctacctgtggtgggtaaacaatcagagcctcccggtcagtcccaggctgcagctgtccaatgacaacaggaccctcactctactcagtgtcacaaggaatgatgtaggaccctatgagtgtggagattgcagtgagcccagatcgcaccactgcactccagtctggcaacagagcaagactccatctcaaaaagaaaagaaaagaagactctgacctgt

SEQ ID NO: 836 - DNA, 340 bp, Homo sapiens
  misc_feature 296, 323: n = A,T,C or G
actgagattgtccatggcattcataactgtcttcctaaaaacaaagcaatggctcaccaacgagccagccttcatgcttacatgtgacactgtaagtggaagtttagaaggatgtcctgacattaaaaagtagcctatcatcagattccagagctgaacagctgtgtttttctgtcagattttgattgttttggccttgcttgggaaaacctgcaggagtattgtatttttggcattgtagagcatttgagtagttggttcctttaaaaaggctttgaatactgtcctaaaaactnatccctaccactcacaagaaccaaagntttacctggctaatagt

SEQ ID NO: 837 - DNA, 473 bp, Homo sapiens
  misc_feature 19, 111, 113, 237, 238, 276, 340, 341, 342, 445, 449: n = A,T,C or G
atttgttttcacagcaatnaatcttcagttctttgtttatgattccacttaacaaaaggcctgcagaagtgatttattatttgggtatttggagataatacatttgatggntntttggaaaacctttttcactccatactcagatatgcttcattgtcaaatgcatatttagattagattattgaattgtaatgtttatctgctgctttttttaaataaaatttgactgaaaatgtnnaattggcattttttaatgacttagccaaagaagtgcanctattattccatattaataggcttgcatttgcttttcctaaatcttatttaggctaaatcagtnnntatttttctctgattttttttaataccacagaatcacctgagtgtcaattgaaagtttgtcaattaaaaggtaacctttttaatctcgtaggaggaatctcantaanacatttttcctgatatgtagagca

SEQ ID NO: 838 - DNA, 205 bp, Homo sapiens
actgcggcgggtaggcctaggactgtgggggcaatgaatgaagcgaacagattttcgttcattttggttctcggggtttgttataattttttatttttatgggctttggtgagggaggtaagtggtagcttgtgtttaatatttttagttgggtgatgagaaatagtgtaaggagtatgggggtaattatggtgggccatacggt

SEQ ID NO: 839 - DNA, 167 bp, Homo sapiens
accaggaagttcattctcaattcccttcgaacgcagagattctgcagacatttaaaagcccaatgctgttcccaagcaagaggcagcacctgacaacaatgctgcatttaatggagcaggattacagtaacattggatattcataaagaagatttttaaagtacctg

SEQ ID NO: 840 - DNA, 332 bp, Homo sapiens
  misc_feature 16, 123, 126, 153, 210: n = A,T,C or G
cttggccccattgtanattgccctgtgcagtaaactttcaaggtgtcggctgccccagattgcttcatttgctgggtgtggaaagagttgctatggccaggcatatgggatttggaagctcancanaagtgacttctgctctgtggttgctgntccccggctttcacagacatggtatggcagccattcttttatctatttaaccaagangatgctggggaattgtgctgcttgtcctgttggctggtggctgcattatgtcctggggtgtgcatgtgggtctatttagagcttctgtcccttccttcccattgcaagttgcacccagatga

SEQ ID NO: 841 - DNA, 195 bp, Homo sapiens; identical to SEQ ID NO: 8

SEQ ID NO: 842 - DNA, 501 bp, Homo sapiens
  misc_feature 431, 481: n = A,T,C or G
acctgtgggtttattacctatgggtttatatcctcaaatacgacattctagtcaaagtcttggtaatataaccaatgttttcaaatgtattctgtcatacaaagagcagatttttattgaacttgtgcaataactatattaccatacaatataaatattcatgaatagtttcccaagtctggagcgaccacatagggagaaaatgtaaatgtctcaatttttgttcacaaaagtatattttatcaaattgctgtaagctgtggatagcttaaaagaaaaaaagtttcctgaaatctgggaaacaagacatttaaagaatcagcaaaatttcaaataaaaaattatgaaaatattatcctcattagttcatttagtcccatgaaattaattattttctctgcttgatcttggtggacagtttcatgaagctntcagttagttcattaaagttttggaaattctcagacagtgcagtggtatnagaaacttgtattcaagagt

SEQ ID NO: 843 - DNA, 388 bp, Homo sapiens
  misc_feature 13, 14, 340, 364: n = A,T,C or G
acacatttttgtnngaacatctattttcagttctcttgggtatatacctaggtgtagaattgctcgctcatatggtaatctgtgtttaactttttgaggaagtgccaaattgttttccacagtggctgccccattttacattcccactgacagcatataagggttcctatttcttcacatcctcaccaacacttgctcttttactttttctttcttaatttttttaaatttttttttgaggcaggatcttgctgtgttgcccaagctggaatgcagtggtgcaatcatggctcactgcagcctcagcctcccaggctccgggtgatcctcccacctcagncatctcaagtagctgggactacanggcacatgccaccatgcctggcta

SEQ ID NO: 844 - DNA, 178 bp, Homo sapiens
acttcaaaaaagtaaaagtaggattaaaaccaatgttaaagtgaatacttccaaatcacttaaggggttaaaaggcagaatttggggcctatatatttttctctttaagacaaaaggatccaaaaaaccttcatattgtaagcaggaaaaaagaaatcagttcccaatgacacctggt

SEQ ID NO: 845 - DNA, 270 bp, Homo sapiens
  misc_feature 202, 203: n = A,T,C or G
accacagggaactggagggtaaatcactgatgcaccacaatggcaggttaattcatcaaaactggcttgccagcatgtctggcagtttccacgatgacaaggttcttcacacctatgaaggccacaacggagtttcctcccacaaatcaaaggacacttgtgctccttatccacacagcatatctcattacatttatgccgnncacacaaccgtttcttgttacaccgcttgtcacacataaatgtagcatcttcacttttgagactggt

SEQ ID NO: 846 - DNA, 549 bp, Homo sapiens
acgagacagaacgatggcagacctgcatactgcacgcttggaaaacgagaaagtgaaaaagcagttagctgatgcagtggcagaacttaaactaaatgctatgaaaaaagatcaggacaagactgatacactggaacacgaactaagaagagaagttgaagatctgaaactccgtcttcagatggctgcagaccattataaagaaaaatttaaggaatgccaaaggctccaaaaacaaataaacaaactttcagatcaatcagctaataataataatgtcttcacaaagaaaacggggaatcagcagaaagtgaatgatgcttcagtaaacacagacccagccacttctgcctctactgtagatgtaaagccatcaccttctgcagcagaggcagattttgacatagtaacaaaggggcaagtctgtgaaatgaccaaagaaattgctgacaaaacagaaaagtataataaatgtaaacaactcttgcaggatgagaaagcaaaatgcaataaatatgctgatgaacttgcaaaaatggagctgaaatg

SEQ ID NO: 847 - DNA, 411 bp, Homo sapiens
  misc_feature 184, 239, 240, 251, 361, 375, 386: n = A,T,C or G
acccgagcgccttcccctcacctcaaccagagaagagcatccggttgctttttaaagcttttagcctgccctagcaaggacaaagcatgttagattagagatgcttctgctgatcgcaggggttcttatttgaaaacatctatgatgggggtggggtgggaggagacaggttgtggttatgcangaaaatcttgtcctaaaaatatatgagtttgggggtaaggggtgggatagccaannaaaatcaggtnattattttaaaatgaacatatgtatttttattaacttttagttaaatacagattttacaacgaggtcagcataagcctaaatctatatagagggctaactcaggcaattntcttgtttatttgnagactggattnaaaacaacctgtcctgttttgtcag

SEQ ID NO: 848 - DNA, 277 bp, Homo sapiens
  misc_feature 229: n = A,T,C or G
accggagatcgaccactgactgagccaccctctccgtagggttctttctcgaggactctaccctcctcccccacgtcctgtctcagctgcagtcgtaagtccgtgcaccatccttgacgttttgctgccacctctgtccacattcttcttggatttgtataaaagaatctttttttaccttgatgtagaatcatggtggaaaaagttggaaacacagatctgtgcagtntctacattcactgattattacagtgtgattttcatcggttttgtaagt

SEQ ID NO: 849 - DNA, 445 bp, Homo sapiens
gtctttggccagatgtgccgttagagtgcatagtatccctgggcactggacgttatgagagtgatgtgagaaacacggtaacatacacaagcttgaaaactaaactttctaatgttatcaacagtgctacagatacagaagaagtccatataatgcttgatggcctgttacctcctgacacctattttagattcaatcctgtaatgtgtgaaaacatacctctagatgaaagtcgaaatgaaaagctggatcagctgcagttggaagggttgaaatacatagaaagaaatgaacaaaaaatgaaaaaagttgcaaaaatattaagtcaagaaaaaacaactctgcagaaaattaatgattggataaaattaaaaactgatatgtatgaaggacttccattcttttcaaaattgtgatgagtatatgcttatgttctcataaatga

SEQ ID NO: 850 - DNA, 288 bp, Homo sapiens
acaatgtttataaacttgtttttcttttcaaaatcatcagattttcagattaaattcagcactacacagtatgcccttgaagtaaaatgaggttacctgctttatttggataccaagttcccttcagacagcattaaaataaagacaagtaagactacacagataaaatccagtataattcaaatccaacaatgaaaaatttcccccatattgttgcaaaattctttctactgaaatgctttgctacaataataaaaagcatacattacatataaaagataccagtgt

SEQ ID NO: 851 - DNA, 426 bp, Homo sapiens
gtggggagggggcacggatctccagggaatctgagacagccagaaagggagtgggctgagggttttggggtgggaggtaggggaagggtagatagagttcgtggtcaggtttagggagcagaaggaattggggatgttttccaggaggagtgggacctctcagaaaatttgttcttgggctggacatggtggctcacgcctgtaatcccagcactttgggatgccaaggcggacagatcacgaggtcaggagatcgatcgagaccatcctggccagcatagtgaaactctgtctctactaaaaatacaaaaattagctgggcatggtggcgcgcgcctgtaatcccagctactcaggaagctgaggcaggagaatcgcttgaaccagggagtcggaggttgcagtgagccgggatcgtgccacagt

SEQ ID NO: 852 - DNA, 578 bp, Homo sapiens
cttagagcagcatccagtatttgctttctagataatatgcccaataacatgacctagaggggcttctgtgctgtgtagggatttaaccaacttcagtggttcagggagctcaaactatatgtaaaacaagtttagaatgtatgctatctagcccgttatctctgatccttctctaaaaccatttgaaatagcttcattgatcaacatttcataaatgcatctgtggtagaggtagaaagcagcacctttcctaattggcaaatgatcagactaatgtgtgctaatgtttttcttccatgctttcagtcagattcaactattttatcctccacagttgcttaacttggtgttggaggagggtttaagcattaagataggaagcaggaaatttgattgctctaaatttagaaattatatccctaaaaattaaaacatgaatactgggtggtaatgataattgaggcaaatgtatttattttggtgacattttgcatatatgaagattttctgaaataggaccttcaagatcctagggggttttgtttggtttttaattgtgaggaataaaaaatcttctg

SEQ ID NO: 853 - DNA, 526 bp, Homo sapiens
  misc_feature 15, 488, 518, 519, 520, 521, 522, 523, 524, 525: n = A,T,C or G
acagttcaaatgcantggtgactttgatttatagcaagaacaagttttccatttgctctatatggaaacgtaaagagattttgaaactgctttaacaagggctgccacaagaacttcttttattgacttgaaaaattactcctacattcatgatgtcacaaaatcgtatgtatttttcagtcatggtttcatgcatttttattctataaacatacattataagtatacaaatatagattatattctataaataattcaaggatttataacatatctaaagatacattccttataaatatcagggatttttctgtataaattacttgtttgtttattattattattattattttgagatggagtctagctttgtcaccaggctggagtgcagtggcgtgatctcggctcactgcaacctccgcctcccgggttcaagtgattctcctgcctcagcctcccgagtggctgggattacaggcacacgctgncacgcccagctagattttgtatttttggtnnnnnnnnc

SEQ ID NO: 854 - DNA, 195 bp, Homo sapiens
accattggtggccaattgatttgatggtaagggagggatcgttgacctcgtctgttatgtaaaggatgcgtagggatgggagggcgatgaggactaggatgatggcgggcaggatagttcagacggtttctatttcctgagcgtctgagatgttagtattagttagttttgttgtgagtgttgggaaaagggcgt

SEQ ID NO: 855 - DNA, 257 bp, Homo sapiens
  misc_feature 203, 205, 245: n = A,T,C or G
actgcggcgggtaggcctaggactgtgggggcaatgaatgaagcgaacagattttcgttcattttggttctcagggtttgttataattttttatttttatgggctttggtgagggaggtaagtggtagcttgtgtttaatatttttagttgggtgatgagaaatagtgtaaggagtatgggggtaattatggtgggccatacngnagtatttagttggggcatttcactgtaaagaggtgttggntctcttaatctt

SEQ ID NO: 856 - DNA, 185 bp, Homo sapiens
acatggtgtggggcactagggggcagtagctttccttcacgttggcatccaggaagatccttctggggccggaaggcacagggcagtggggaaccagtgtttggagggtgtcctctgctatctacagaggaagaagagctgcagtgagaggtgggatccctaagttggacccacccattgcggcc

SEQ ID NO: 857 - DNA, 454 bp, Homo sapiens
  misc_feature 451: n = A,T,C or G
actgtggtcgggagactgatttgagactgcagagctgatgctgggtagagggtctggacttgtattcatgttctgtctcagggcagcccctggagcaggagatggcagaggcatttacagctgcagaaaacagggaggaatggaatctgaggtagccctggcctcaaaattcaggcctggctgtatcatttacagagatttttctggagggaaaagtctcatttctgaggaaggcaaggtggctaatcattattaattttttttaaactttttgggccgggcgcagtggctcacgcctgtaatcccagcacttttgggaagccaaagtgggtggatcacttaaggtcaggagttcaagaccagcctggccaacatggtgaaaccctgtctctactaaaaatcaaaaaagtagccgggtgtggtggtgcacacctgtaatcccagctactcngga

SEQ ID NO: 858 - DNA, 571 bp, Homo sapiens
  misc_feature 475, 488: n = A,T,C or G
acagtcatagctcacttcagcctcgaactacttagctcaagagatcctgccgcctcagcctcccgagtagctggaactacaggtactacattcttattttctaacttttaaacactgtattggaggtttttttttaatttacagatcatatttattttactatttttgtagaaaattattaattttgattgtatttttgtattttaaaagcttcttcacttgtgttccctaaatattcatattgctgcccaaaagtatgactgtggaggaaaaaaaaatactttaaaaatccacactttttgttaagaaggaaacatttagcatttatatatttgtgtatggaaaacacttgatattttatccctgttgcatctggctgcacagagcctctcctcaaagatgctacaaaacttgaatataacacattttggaaggctgactaacctcgattctgtgttgtgatgtgcaatactgnttctaatgtttgnataaaaaaaacagtgtaaaacctttttaatgcaaatttatttttttcattgcatattttgcagattttatccacagtgtcatt

SEQ ID NO: 859 - DNA, 520 bp, Homo sapiens
acacaggattggacccagttagacaaaatgaacatacttgtttaggaaaattgcattgcaaaacaggcagaggtgctgtgcagtgattcctatggaattgattggtcccctaggggatgtttagcttgaattgcacctcagtctgcgtgccatggccacactatgttcagctggtctggacaaaatggtcagatggtagaaatggtaagaagtatgacaagagttcctattatctggaaccatggcagtatagtggcacctcaacctcaaatgatatggcccattgtaggagctaaacaaggatttgtggaaattattaatagctcttaataaaatcaaaatttaggaaagaataaaaaagcatctagaaggccactctacaaacttgtctttggatattgcaaaattaaaagaacaaatatttaaagcatcacagccacacttgaccttaatgccaggaactagagtgctcgaaggagctgcagacagattagcagctagtaacctattcaaatggaga

SEQ ID NO: 860 - DNA, 173 bp, Homo sapiens
  misc_feature 120: n = A,T,C or G
acacagacaaatttatgcgaccagggcagaggctgtagatgattcatatttccaattgggagggaggactcgcttggtcttataatatcgagccaaacggtgaatccggctctctattanaatcagacggaatttagcatccttatcctttctgttcctctcaagatgctttc

SEQ ID NO: 861 - DNA, 323 bp, Homo sapiens; identical to SEQ ID NO: 593

SEQ ID NO: 862 - DNA, 320 bp, Homo sapiens
  misc_feature 236: n = A,T,C or G
acagcaaagcgacccttggtgtcatagatcagacggaaattctctcccgtcttgtcaatgctgatgacatccatgaatccagcagggtaggttatatcagttcggaccttgccatcgattttaatgaaccgctgcatgcaaatcttctttacttcatctcctgtcagggcatacttaagtctgttcctcaggaaaatgatgagggggagacactctctcaacttgtggggaccggnggatggacgaggagcaaacacaccggtcaatttatccaggcatccaatgctttggagctgccacccgcttcagatgctacctgc

SEQ ID NO: 863 - DNA, 277 bp, Homo sapiens
actgatgaagtatcgagtaaggaggagttaccaaccacaaatgtagctctgtttggggtatctgtttcagccactaagggttttataacctcaacttttctttctcggtttatccctgtctcttcctctactgaatcacatttctggttatttctgaccagcataggttcacgtctacaacaattgtctgggactttcttttgtgtcactacaggagatgtgatagggttttttaatgagagtgtagattctgtctctgtttgttcaaagaagatgt

SEQ ID NO: 864 - DNA, 407 bp, Homo sapiens
acttcctcaatgtatttgggcttcggagcatttactctctgattctgggccaagataatgccgctgaccaatcacgaatgatgcaggagcagatgacgggagcagccatggccatgcccgcagacacaaacaaagctttcaagacagagtgggaagctttggagctgacggatcaccagtgggcactagatgatgtcgaagaagagctcatggccaaagacctccacttcgaaggcatgttcaaaaaggaattacagacctctattttttgaagaccgagcagggattagctgtgtcaggaacttggagttgcacttaaccttgtaactttgtttggagctggcacctcttgaaataaaaaggaggatgcacgagctggcaggcatgcaaaaaaaaaaaaaaaaaaa

SEQ ID NO: 865 - DNA, 195 bp, Homo sapiens; identical to SEQ ID NO: 8

SEQ ID NO: 866 - DNA, 242 bp, Homo sapiens
acaaagttaaggaggtagggaggatggtggggaggagggggcggactaccctgcaggacgcgggaggctgctcagactgtggtgatgtcaggaagggccgcacactttggcatggacgatgcactaaaaaaagagaaagggaattctaaatccctcttaaccagctggagagggaaggacgcagggccagggtggggacaagtgttggcttcggaaggctctgagtggtggggccggaatgt

SEQ ID NO: 867 - DNA, 419 bp, Homo sapiens
acctacacacgtcgtgcattagcctgtatggttttgctgtctaggatctattttcaatataatacagagtcaaagcaatgaaatggaaaccaaagggttaaactagttttgtgggttttatttcctccgaagtctaaatgttcacatttctgattagaataatgtggtttataattaattttcatgaattattcataacacttaaggtaaaacaaaaaagctgatattggttattttggttattatagctctatagcttacactcaacatttaagggtgaaaaccgcatccattttgttaatgctgtgaactgcagaagaaaaatttttataatataaatttttaagaaaaagttaatacaaataaatgtaacaactaaaataaatgtataatgccatggctaatgatttgcatataag

SEQ ID NO: 868 - DNA, 404 bp, Homo sapiens
  misc_feature 13: n = A,T,C or G
acgattatagttnggatatgtggagtttgggttgtatgctggcaagtatgatctttcggaaggagccatttttccatggacatgacaattatgatcagttggtgaggatagccaaggttctggggacagaagatttatatgactatattgacaaatacaacattgaattagatccacgtttcaatgatatcttgggcagacactctcgaaagcgatgggaacgctttgtccacagtgaaaatcagcaccttgtcagccctgaggccttggatttcctggacaaactgctgcgatatgaccaccagtcacggcttactgcaagagaggcaatggagcacccctatttctacactgttgtgaaggaccaggctcgaatgggttcatctagcatgccagggggcagt

SEQ ID NO: 869 - DNA, 602 bp, Homo sapiens
  misc_feature 566, 583: n = A,T,C or G
acaatcatgcctctttgcccatccgttatctatgactcctgtcaccctacaatggcagagttgaatagctgtaatagagaccacatggcccaacatattcgctatctggcactttacaggaaaagtttgccaatctctgctttataccatgaccagaatgccctgatactcaaatctaatcttgtgattcccctgctcaaacttttccactgtgttcctgcagaaaacattgctggcttcctatgcatagtcattatttattctttattgctgtagaaacacaagttcatttagatatttactattccgttacccccatccaatcttaaaagaaaaatcattattctaagctaatcacagtaattacatttgctttcctagtgattggtatagaaataagcatgtggtataatccagccaataaaatgttacaggaagattactgcaagcttccaagttttcttcctatttaaaaaaaaaaatgtgaacaaaagcagcacccccagccttcagatattgtcttgagttagcatgatgattggagctgttgctaattagccaaccangaaaggagacatggacnaaacactgccgatagcaca

SEQ ID NO: 870 - DNA, 195 bp, Homo sapiens; identical to SEQ ID NO: 8

SEQ ID NO: 871 - DNA, 285 bp, Homo sapiens
  misc_feature 16: n = A,T,C or G
acctggctttcctccncaagcggatgaacaccaacccttcccgaggcccctaccacttccgagcccccagccgcatcttctggcggaccgtgcgaggtatgctgccccacaaaaccaagcgaggccaggccgctctggaccgtctcaaggtgtttgacggcatcccaccgccctacgacaagaaaaagcggatggtggttcctgctgccctcaaggtcgtgcgtctgaagcctacaagaaagtttgcctatctggggcgcctggctcacgaggttggctggaagt

SEQ ID NO: 872 - DNA, 241 bp, Homo sapiens
actgcctccctcttcaatgctgccaactggatggagtccagttcctgggatggtcgttatgccatggtggtctgtggagacattgccgtctatcccagtggtaatgctcgtcccacaggtggggccggagctgtggctatgctgattgggcccaaggcccctctggccctggagcgagggctgaggggaacccatatggagaatgtgtatgacttctacaaaccaaatttggcctcggagt

SEQ ID NO: 873 - DNA, 179 bp, Homo sapiens
  misc_feature 168, 170: n = A,T,C or G
acaatggaatatcattcagccttacaaaaggagatgctgctatatttgcaataacatgggtgaacctggaggacgttacgctaagtaaaataacaatattgaaggaaagaaataatactgaaagaaaaatattgcttgatctcacttatatatggaacttaaaaactncncatagaaac

SEQ ID NO: 874 - DNA, 511 bp, Homo sapiens
  misc_feature 146, 242, 303, 325, 420, 461: n = A,T,C or G
caagctttttttttttttttttttttttttttttatttcatctctttttattacttgacctaccattaagacaatctataacaaaaaaagtatattagcacacatggtataatcagactggtaatcaggaagcaatacaaaacggncctttggccatctatactttctagagcagtaaatctcataaattcacttaccaagcccaggaataatgacttttaaagccttgaatatcaactaanacaaattatgccaattctgatttctcacatatacttagattacacaaagataaagctttanatgtgatcattgtttaatgtanacttatctttaaagtttttaattaaaaactacagaagggagtaaacagcaagccaaatgatttaaccaaatgatttaagagtaaaactcactcanaaagcattatacgtaactaaatatacatgagcatgattatntacatacatgaaactgcaattttatggcattctaagtaactcatttaagt

SEQ ID NO: 875 - DNA, 332 bp, Homo sapiens
actcaatattataaaaacctcaaataattgacttgattttacacaacatccttcccttttctacaagttaatttttttacaaatcatttgggttatctcctaaataggttatattttattgcttctagaaacaatgtttcaaaatatatgtgcattatcagtaataatttgtataaatatttcccacaacaattttcataattttcaaagactaatttcttgactgaagatattttgctagggaagtgaaactttaaaattttgtagattttaaaaaatattgttgaatggtgtcatgcaaaggatttatatagtgtgctcccactaactgt

SEQ ID NO: 876 - DNA, 446 bp, Homo sapiens
  misc_feature 365, 393, 438: n = A,T,C or G
acggtaacatgctgtccaggtttgtagcctaggagcgataagctgtatcattgagtctatgtgtataataggctataccatctaggtttgtgtaagcctactctatgatatttatacaattatgaaatcacccagcaacccatttctcagaacttatcccagtcattaagcaatacatgactatattattatcactaacttattttgtggctttgataagccgaatatgggaaaataaacatttactgaagaaaaggcagtctatacatcaagttttggtaaaagaaataagtttttttttgagacgaggtctcgctctgtcacccaggctggagtgcagtggcgcgatcttggctcactgcagnctccacctcccaggttcaagcaattctnccacctcagcctcccgagtagctgggattacagctgtgcgccatnatgcctgg

SEQ ID NO: 877 - DNA, 563 bp, Homo sapiens
actctttggaggagcaaaggaacaatagaacctagagtttcttttttagggggagataagggtcttgctgtgttgcccaggctggtggctggtctcaaaaatgacacattgaatacaagggaacaattcaaatgaccatcactgatttctcaacagaaacaatggaggccagcagacagtgaagtctttaatagaagaaaaaaacctgtcaatctataattctgtatcctgcaaaactgtccttcaacaatgaaggtagaatagacatttcatacaacagaaagctagaattgatccccaatcaacctgcactccaaactaaagttagttcttcaggctgaaggaaaatgttatcagatggaaactcagatcttcagggaaaactgacactcaaactggtatacatgagggtaattataaaataccattttttattttagtttcctcaaaatgcacagaattgttaaaagcaaaacctatttaaagtaaaatcttatttggggctataagatgtagatgtaaaatatatgacaactactgcataaagcagaggtcagcacact

SEQ ID NO: 878 - DNA, 482 bp, Homo sapiens
  misc_feature 282, 317, 318, 463: n = A,T,C or G
actgattttaaaaactaataacttaaaactgccacacgcaaaaaagaaaaccaaagtggtgccacaaaacattctcctttccttctgaaggttttacgatgcattgttatcattaaccagtcttttactactaaacttaaatggccaattgaaacaaacagttctgagaccgttcttccaccactgattaagagtggggtggcaggtattagggataatattcatttagccttctgagctttctgggcagacttggtgaccttgccagctccagcagccttnttgtccactgctttgatgacacccaccgcaactgnntgtctcatatcacgaacagcaaagcgacccaaaggtggatagtctgagaagctctcaacacacatgggcttgccaggaaccatatcaacaatggcagcatcaccagacttcaagaatttagggccatcttccagctttttaccangaacggcgatcaatctttt

SEQ ID NO: 879 - DNA, 321 bp, Homo sapiens
acagagttttatataaatttaaaccaatttttaaaacaaaactgcggacaccaccataaaaatggaatcaaaagaaagttaatttatgaaattaagaggtcagcagaatatactcagtgatggaagacacttgggaaagtctttttaatagaacaagaacgatcttaatttaagaatattatcctggtttaacaacagtgccctgtttacaacagattgtgccctatctcatctgcagccgaggaataaaggattctgattagaaagagggttgcctacagattagtaagcaattccttggatcttatgcacagaacttgt

SEQ ID NO: 880 - DNA, 180 bp, Homo sapiens
  misc_feature 153, 154: n = A,T,C or G
gccacctgcaagatggacacgagccacaagctgcactgtgaacctgggcactccgcgccgatgccaccggcctgtgggtctctgaagggacccccccccaatcggactgccaaattctccggtttgccccgggatattatagaaaattatttnnatgaataatgaaaataaaacacacct

SEQ ID NO: 881 - DNA, 279 bp, Homo sapiens
accacgtggttgaaattggagccagctgtaaacatggccgccttcctcagacattctccgaagaccaccatcagcagccctgtgacactgagccaggtaatctgcttcagttctggccaaaagatattttcaagtatgaactctaaccaagaagaaagagcagctactgtatactccaggctgtgattcaggagaaaggaatccaaggacagactttgggattattgactgctgtcaccaagtattcagaatagtggaacaatgacagggagcacatgt

SEQ ID NO: 882 - DNA, 207 bp, Homo sapiens
  misc_feature 173: n = A,T,C or G
acatgtcaaatgccttctgtcccagcacagctcccgtggttccattcaccagggcgatgtttaggcctctgcccacattgtttttcacaggactcatgatcatgcggtcttcaaagcacatagtagggcccacgacgttggcggccccactgcagattttaaacgcaaagtanttggctgggcagggcttgatgaggccacacttgt

SEQ ID NO: 883 - DNA, 375 bp, Homo sapiens
  misc_feature 17: n = A,T,C or G
actgtaattatacaaantccaaagaataaaatgttactagttacactcgttaaaatgaaactgacaaccaaaagaataacaaaacaaaaagaaatctctgtcagaatccatagagacatttgacaatattacaaaaaaaagtagtcaaataattgtcccagcatgctgcagttcattgccataacttcataaattcccagctctttgggggaaagaaagtgcgtttttcacagcctatatagttcttaaagaaatagctctcacatgtatgcaggtcaacagaacaaggaatgcaaagtctaggcaccacgattgctcagacagcaacagagtttcaaagagtccaacttgacactcttctgaaccagatgtggt

SEQ ID NO: 884 - DNA, 477 bp, Homo sapiens
  misc_feature 16, 17, 181, 431, 443, 454: n = A,T,C or G
acttagaaccagaatnncatactgtataatttagtggacttagttatttcaaaagatattattccacttccctgctaaatgaaattaatcatcacctttgactttcaagaggtgaaaatagcgtgtaataaagcatatcttttagtcatcaggcctactgtgaaaagcaaatacagactgnatatattatatactagctgttattttttgcttcaattgtattttatctcttttgttaaaaaaacatgatttcatcttgtaactgaactgcacatataatatcagagaaaatcttctaatggcatgacttgtaaaatctctaccccaacaaattagtttgatatctaggagttaccttatctgaaacataatgagttatgttctacagtgtctgccatcaaactttaaacaaatcaggtccctctttcagntaagtatgttgntatactgaatncatgagtgttatggaaaagattt

SEQ ID NO: 885 - DNA, 310 bp, Homo sapiens
  misc_feature 8, 187, 188, 237, 264, 299: n = A,T,C or G
actactcnattgtcaacgtcaaggagtcgcaggtcgcctggttctaggaataatgggggaagtatgtaggagttgaagattagtccgccgtagtcggtgtactcgtaggttcagtaccattggtggccaattgatttgatggtaagggagggatcgttgacctcgtctgttatgtaaaggatgcgtnnggatgggagggcgatgaggactaggatgatggcgggcaggatagttcanacggtttctatttcctgagcgtctganatgttagtattagttagttttgttgtgagtgttangaaaagggcgt

SEQ ID NO: 886 - DNA, 548 bp, Homo sapiens
acatataaatgaatctggtgttggggaaaccttcatctgaaacccacagatgtctctggggcagatccccactgtcctaccagttgccctagcccagactctgagctgctcaccggagtcattgggaaggaaaagtggagaaatggcaagtctagagtctcagaaactcccctgggggtttcacctgggccctggaggaattcagctcagcttcttcctaggtccaagccccccacaccttttccccaaccacagagaacaagagtttgttctgttctgggggacagagaaggcgcttcccaacttcatactggcaggagggtgaggaggttcactgagctccccagatctcccactgcggggagacagaagcctggactctgccccacgctgtggccctggagggtcccggtttgtcagttcttggtgctctgtgttcccagaggcaggcggaggttgaagaaaggaacctgggatgaggggtgctgggtataagcagagagggatgggttcctgctccaagggaccctttgcctttcttctgccct

SEQ ID NO: 887 - DNA, 222 bp, Homo sapiens
  misc_feature 24, 89, 145, 152, 153, 188: n = A,T,C or G
actgattattaaaatgacatgtanttatcagagaattcactgacgtgtggcttaatacatgtaaatctagacctctgacatcatggtgntttcttaatgcctcacattgctggcacggggatgtgccctgcctgccagcacctangacttcnngttgggttgcagcttatgacatgcatgataggttntggaaggtaacttttaactgcaaacctataaagt

SEQ ID NO: 888 - DNA, 439 bp, Homo sapiens
  misc_feature 233, 397, 432: n = A,T,C or G
acagcattctggaataaagcaagagtgttcattcacacacacagtagcttcaaaactgttcgatctgtttgttcccatgtagttttctaaagatggaaaaaaaggactttggtcatcaagactactgtggccatattagattactggaacatctaagcatcagtgtgtgaccatgcgaacaaaagacttcgtggagtgtctatttttaaaaaggtttatgtgtgtcgaggcanttgtaaaagatttactgcagaatcaagcccacttttaggcttaggaccaggttctaactatctaaaaatattgactgataacaaaaagtgttctaaatgtggctattctgatccatagttgttttttaaagaaaaaaaatgtatatacagaaagagtataaaantttgtgaatttaatgcaaattagcttccagtcttnacttccc

SEQ ID NO: 889 - DNA, 577 bp, Homo sapiens
actactaaattaataaatttattccacttttgaaatgacagccaaaaatccacctaattgattctcatttggcacgttcttctcaattctgttcactaaattaaaattactaaatttaaactgccaagagccatgatgttgtctgcacaagacaacattttccatcactttcagaaagttatatttggcacgttaaggaaaaaaatataatcccacagcagcagctatttaaaataagacagccacaggattcatgcagaatattttaaatattcctgttgaacacaatgatttaattgattttttcttcacggattatgctcccaaacatcctatatgcatccatggaaatttaaagatcctggaatagcgtcttccatgtgggacatcttaaaagatagtattttggcttcagtgagttacacaaatgaatcaccagtccttattaattcaatgggtctgtttacagagtgtggtaatttcgttctttagatttgcagaatttataaagaaagaaaattacagcctgcacacccaagaccaggacaattcctccaatgaaactggctgcatcaaa

SEQ ID NO: 890 - DNA, 364 bp, Homo sapiens
acacaaagagggggtgggtgtcggatgcagagtgtgtggcctgatgctccacggcgtgcaggacggggggctaatagtaggtttccttctccacccagccgccagggcgtcgcctgatgatgagttttctgacttcgtcatatacgaagatgagaagagagtaggggaaggcacagaaccaccaggtaggtttgaggggatacatcctaagagcaacacccattccagggcagtaggaaaggaaagcagccagggctgtctcttcaaagaggccaaatatcaagatcttgttcttcatcccctgctggaagaccgaattcctcctggtcttacagatgaccaagtcggcccactgcaccaccac

SEQ ID NO: 891 - DNA, 456 bp, Homo sapiens
ttggaatccctgttgctacattgactaaaaggtcatgatgaatggaatatgtaagacttggctcatagaaacctaatcagatggttagaggtgttggcagtttaggacctgctgtcataaatgtgtgaacaaccttttgtaacctaacctattgacctgcatgttttttctttaccccaattcattacatggaggctcaatcttgagtttgctttactggttcagcaaaagccaggaagaacaactttgtagtaatcaaaatgttatccaactgtatattgtttactttattgtaaatactggtgaacagtggttaataaatagttttatattcctttatgcaattattagacttttttctttatttgatatgcctttacagtagaaatagaaatgcccacactcattggattatctttgtttataagttagatgataccagtaaggcattacagt

SEQ ID NO: 892 - DNA, 242 bp, Homo sapiens
actgtaacctgatgccagatgctatgggcgtgatgagaactagagcattgcagcatggaggaaactgtgaggcaccagatcctgtgcttctgcaggccattttctgaaaacccctgttaggaaggttggatttggcgtgacttgcttgagcaagagtcctggggagagattttgaggtttaatttaacggtatatccagagctaacagtgactcaactcgtctagttctgcaagtcagatgt

SEQ ID NO: 893 - DNA, 473 bp, Homo sapiens
acaaagcagcaactgcaatactcaaggttaaaacattagaaaagcatttgtgtgacaggtatattacagtattatcaaaatattacattttcagacttacttagcagataatcatccaccagagcttaaatctttaaattatttccatagtcttaaaaaatatgtaatgtcagaatgcatataaaaagaatgtaaaaggaaacctaaaatacaaatggaataatgtaacaaataaatatttgatttcagtaactgttaataatcagctcaacaccaccattctctctaaactcaatttaattcttataggaataatgaactgtcaaatgccatggcataattatttatttccaagctatcatcaatgattagaactaaaaaaaatttggcataaaaaaatcacaattcagcataaataaagctatttttagcttcaacactagctagcatctctaagaattgttgaaataagt

SEQ ID NO: 894 - DNA, 500 bp, Homo sapiens
  misc_feature 436: n = A,T,C or G
acctctttagtcttcatcagatttgtttttctctaaaagtgccaccttgtggaatataccggaataaaacaagaaagctcatctcttaggacagtgtgaatgtttagaaagacttttgcaagaaaagtcaccttcctttcctaccacatcaacttcaaattgctgtaacagtatttcagcagatgctcgaaaagagcctgtatttattttcaggtggctcttgttttcttcctaaggctagacaaggtaacaatatgttgaaggaagtccacttctactcatttagctaaacgttatcacttcctggaaatgctgagaaatagaaaacattttgaaaagctgattggcacttcattaagaaaataaaaatccccagaaaggctacttgagaaaaaaacgtgtaaaaattggaccccttctgtttttacatttctgntgcttacaaaggtcagaagatagagagaccaaaggattatttttggtttattttctgaaaaagt

SEQ ID NO: 895 - DNA, 457 bp, Homo sapiens
acaagatttttaaggagagttaacaaaggtttaaatagatgacaaaaagggacttggtgacagatagtatttgccaatcaaattattcaacaggttttgaagggcgtgtgctaaacttctaaggtgaatcctgacgtggattactggattaccttttttgttgttttatttcacccaagtgcgtctatgtcatttacctaagtttttatgtgtggagtattctttgtaggagaggaaagataacagctgtagtctgattaacagtttttagtatctcacaatgaaaaataaataatgtgacttaaacattttgcatacttaaatttacatagagttttagcaagaaaataaggcatgactgataatggctcaggaaagttctaaatggtgtaacagactagatcttattaaagttccaaagaatttattatcaaaactaaaacaaaacttcagttgt

SEQ ID NO: 896 - DNA, 595 bp, Homo sapiens
actctgccttttaggagatgaggtaagacatatacatagatggcttttactagccaaggcaatgtaaatggactaagattctcatgtgacttgaggttatctgatgaatttattctcttcaaaaccacctacttttagagggcatgtttaacccctctctttatttaaggagggagagaaaaacacatgtaaccagaattcagagtgggttactcaacctaagagaacatacggagttctctttgggaaaacgacaagactacagtgttcacttcgcaccatgaagtggcactcctgttatggctgtcagagtcctctcacttcttatgaaaggatgcatctgattctgaaattactgatatattcgatcagttagggatgttttaaaaagtgaaaacaaatgccacacatacactttctagctttctgaaatcaccgaacacattacaaaaaatagagaatttaccctattaacttttagagaattttccaataatattcttggttaaagaagccaagtttgtgcatattcccaattttcagtgttcttgtttttatgcacaagagccaaagtagtatacacatattttacctc

SEQ ID NO: 897 - DNA, 559 bp, Homo sapiens
  misc_feature 446, 550: n = A,T,C or G
ggcgggtggatcatgagatcaggagatcgagactatcctggctaacacggtgaaatcccatctctaataaaaatacaaaaaattagccaggcgtggtggcatgcacctgaggtgccagctactcgggtggatcatgagatcaggagatcgagactatcctggctaacacggtgaaatcccatctctaataaaaatacaaaaaaaaaaaaaaaaaaagaatgaagatgaccagtttacataatttatctaataacttccactttttgaaatatatctaagaataaggaattaaaccaaatacacaggtgccaacattggtttacagttatactaaagctcacatacataggtcataatagttctacaagtcctgactgtaggcccttagtctattttggattaagttctatagcagaattgtttggtttaccaaaaataaagtcagncatggacagttgcaacaaataataaactggtctgatagcaaaggaagagatgttaaaaactacctaagagaccatgtggggccccatttgcctctgtgatgtgntatgctata

SEQ ID NO: 898 - DNA, 434 bp, Homo sapiens
cccggcctgaggtgtcggccggatccctccttctcccggcgcctcaagcggaagaccattcctcaagaattttgtatccaaggcccaaaagtttgttacccaagatgatgaatgctgacatggatgcagttgatgctgaaaatcaagtggaactggaggaaaaaacaagacttattaatcaagtgttggaactccaacacacacttgaagatctctctgcaagagtagatgcagttaaggaagaaaatctgaagctaaaatcagaaaaccaagttcttggacaatatatagaaaatctcatgtcagcttctagtgtttttcaaacaactgacacaaaaagcaaaagaaagtaagggattgacacccttctgttttatggaattgctgctgatcattttttctttaaaacttggatagattccaaaagttacagt

SEQ ID NO: 899 - DNA, 276 bp, Homo sapiens
acccagttcatggtaatttgttacagcaatcctaggaagctaatactctgacagaaaaaaatcttggataatatgcatgagaaaaatccttcaataaacacaaaattggtttcaaaatgttttcatgtaaaaataaattaacttttctgtaattagattgtgttttatagtaattcttgcctgcttcttagtctttgttgtaggatgcataataaaatacatgaatgagttttaaatggttagctttggagaatggttttgggaagttcctacagt

SEQ ID NO: 900 - DNA, 302 bp, Homo sapiens
acacaattatcaaagctgatattgaacacaaacaaattgatacaattcagtaatccgataatattcatagtcaaataagttactttaaattgcatgcaatacaactttatgttccatagcatctttaataaaaaccgtttaccaaaatggctcttcaaacttaaaaagtgcaattacagagtgcaaaataaaaagaaaatacattatattacatttaacatcatcaaatttgaataacagatatttaaatgaaattactctttttaaaaacattaaaatatacaccagaaatactgtttgta

SEQ ID NO: 901 - DNA, 404 bp, Homo sapiens
gttgaacggctgtgggcgtcttgctgccttgggtagggggttaaaatcgttcttgagaggaacgtctctgtgcgaagagataatgagtttagctctgagaagtgagcttgtagtggacaaaacaaagaggaaaaaaagaagagaactgtctgaggaacagaaacaagaaattaaagatgcttttgaactatttgatacagacaaagatgaagcaatagattatcatgaattaaaggtggcaatgagagccttggggtttgatgtaaaaaaagctgatgtacacaacaaatttatgtctcagctacatgatctaaaagttaaaggtcccaggagccccatcctgaacttggaaagtgtagccttcagaggtagtttctggcacaacgttttgatcttcctcttcc

SEQ ID NO: 902 - DNA, 474 bp, Homo sapiens
  misc_feature 155, 156, 188, 408, 409, 461: n = A,T,C or G
acttatttcaacaattcttagagatgctagctagtgttgaagctaaaaatagctttatttatgctgaattgtgatttttttatgccaaattttttttagttctaatcattgatgatagcttggaaataaataattatgccatggcatttgacagnncattattcctataagaattaaattgagtttanagagaatggtggtgttgagctgattattaacagttactgaaatcaaatatttatttgttacattattccatttgtattttaggtttccttttacattctttttatatgcattctgacattacatattttttaagactatggaaataatttaaagatttaagctctggtggatgattatctgctaagtaagtctgaaaatgtaatattttgataatactgnnatatacctgtcacacaaatgcttttctaatgttttaaccttgagtattgcanttgctgctttgtg

SEQ ID NO: 903 - DNA, 168 bp, Homo sapiens
  misc_feature 19: n = A,T,C or G
acatgaattattccagttntaaagtattatgcatgtttgtttaataaatgtggcatggttttaatacaaatgctatgttatttaaaagttagaggaacatttctattgacaaaaatatgcttcatttacatataatgttaccatatggtgataatgattaaattagat

SEQ ID NO: 904 - DNA, 272 bp, Homo sapiens
  misc_feature 13, 14, 52, 121, 218, 240: n = A,T,C or G
gaatttctcttcnntgccattgaaacgatgccttgtgtcaagaagaaggcanactgggccttgcgctggattggggacaaagaggctacctatggtgaacgtgttgtagcctttgctgcantggaaggcattttcttttccggttcttttgcgtcgatattctggctcaagaaacgaggactgatgcctggcctcacattttctaatgaacttattancagagatgagggtttacactgngattttgcttgcctgatgtttaaacacctggt

SEQ ID NO: 905 - DNA, 297 bp, Homo sapiens
  misc_feature 16, 17, 254: n = A,T,C or G
acagatctccagaagnnttgctggggtcagctcgttactcaactccagttgacatttggagtataggcaccatatttgctgaactagcaactaagaaaccacttttccatggggattcagaaattgatcaactcttcaggattttcagagctttgggcactcccaataatgaagtgtggccagaagtggaatctttacaggactataagaatacatttcccaaatggaaaccaggaagcctagcatcccatgtncaaaaacttggatgaaaatggcttggatttgctctcgaaaatg

SEQ ID NO: 906 - DNA, 465 bp, Homo sapiens
acacttctgtcttcaaactgtatcttctttggatggaattaagatgtaactgtatagttttaagataaataaatgggaagttggtccaactaagatgacagcagatatattacatgcaggatttaatattttctaattctctcttttaaaaaaaaggatgctgttggattgggaaaaaaaaagtcaaaaaagaacccagattcaatatataaaaatgtcccacaataggtcgacaatggcagtaaaaataagaggaaaaaagtaatctttctggaacatcatttttcaataacatagaaacactaagtgccaggaagattcctattcatgtaattttagcatccaagtttccctctatttattttattggaacaaatgctttaaataaactatttgtcctcttcactgaagagagctggtctatttcatctttaatgagctagtttttgggaagattagccatgt

SEQ ID NO: 907 - DNA, 503 bp, Homo sapiens
  misc_feature 432, 435, 437: n = A,T,C or G
acctgtgggtttattacctatgggtttatatcctcaaatacgacattctagtcaaagtcttggtaatataaccaatgttttcaaatgtattctgtcatacaaagagcagatttttattgaacttgtgcaataactatattaccatacaatataaatattcatgaatagtttcccaagtctggagcgaccacatagggagaaaatgtaaatgtctcaatttttgttcacaaaagtatattttatcaaattgctgtaagctgtggatagcttaaaagaaaaaaagtttcctgaaatctgggaaacaagacatttaaagaatcagcaaaatttcaaataaaaaattatgaaaatattatcctcattagttcatttagtcccatgaaattaattattttctctgcttgatcttggtggacagtttcatgaagctgncantntagttcattaaagttttggaaattctcagacagtgcaggtggtatcagaaacttgtattcaagagt

SEQ ID NO: 908 - DNA, 467 bp, Homo sapiens
  misc_feature 335: n = A,T,C or G
acataataagattttttaaaatctattgccattcatttatttttgcacaaaaacgtataaatatgtcaccagcttttcttaacttaaaaaacttaaataaaagacaccagatgaaaactaccctttgctgccatttttttttaagtttttttgtaggggttttttattttttgtgtttttttttctttttctgcttagaattgggtttctagggaagaaaagcccctgcattaaaaacagcccatttaaaaaaaaaattcaaagttctgatgaattccgggaaaaaagcaaccccaaagtggtaaaagattacaaatatctactttacaatttgncttctcaccaagataattttatacaagtttacaatcttcatcttcttatgctcttcaaaaggccttgagaattttcctttctgattaagaaaaaatagcactgcaatatttttaaagtcaattttacactgt

SEQ ID NO: 909 - DNA, 442 bp, Homo sapiens
acatcatcaaggctccctttgcactcccaagaagaactggtaattttaaacaaaagtatgtgtctttatttgtattggaaaatactgtctttaaattgtttcttgttgacactccccacaatggaaaaattaccgaattaaacctgttttatggatggcagcttggagcatagcaagaagttggaggatttgaattccattcccagttctcattgtgttttgtttcttaaaactataataatcggttactgttataaagtttaaaaggtggttttaatgtgaatagcaaattctggtatatcgtgactaacgcttaagaatgcctgtctttgagaggaaggtgttataatattaatgaacagtgccaaatacactgtgcatatctgcaatttaatctttgaatgtatgttactggattagctccctcctcctgtgtgatggt

SEQ ID NO: 910 - DNA, 119 bp, Homo sapiens
  misc_feature 1, 53, 96, 103: n = A,T,C or G
ncgggaggatcctattggtgcgggggctttgtatgattatgggcgttgattantagtagttactggttgaacattgtttgttggtgtgtatattgnaattganattgctcgggggaata

SEQ ID NO: 911 - DNA, 59 bp, Homo sapiens
  misc_feature 1, 2: n = A,T,C or G
nnactgagccaatcccacttaggaatggaaggcttggacatggaagggaggatataaac

SEQ ID NO: 912 - DNA, 292 bp, Homo sapiens
acatgcttcggtcagggtcggggcaggtggaagtgtgatcccgtcgaccaatgccaggattcagagactgggacgttttatcaaattggagattcatgggagaagtatgtgcatggtgtcagataccagtgctactgctatggccgtggcattggggagtggcattgccaacctttacagacctatccaagctcaagtggtcctgtcgaagtatttatcactgagactccgagtcagcccaactcccaccccatccagtggaatgcaccacagccatctcacatttccaagt

SEQ ID NO: 913 - DNA, 301 bp, Homo sapiens
  misc_feature 14, 15: n = A,T,C or G
acacaattatcaannctgatattgaacacaaacaaattgatacaattcagtaatccgataatattcatagtcaaataagttactttaaattgcatgcaatacaactttatgttccatagcatctttaataaaaaccgtttaccaaaatggctcttcaaacttaaaaagtgcaattacagagtgcaaaataaaaagaaaatacattatattacatttaacatcatcaaatttgaataacagatatttaaatgaaattactctttttaaaaacattaaaatatacaccagaaatactgtttgt

SEQ ID NO: 914 - DNA, 552 bp, Homo sapiens
  misc_feature 13, 14, 428: n = A,T,C or G
acaaagaatccgnnaagagactattaaatgtgacatgaattatggagtagaaaaatctgcttgatttattaattttatgatatatgtgatcagtatctaatttgatataaaattgaaaatattaaaaaatcattttttttcctcagagttaaaattatttccctcatactaatgcttaatggcaatgattactccagagttttttaatttttacactggggcaatagactaggaggtctctgatttcttcttggtctaaagtgttttgattttatttctacataatagctttggtattcatgtatatacatgcatttaattgtgattttatcacctttcccatttctttccccacaagctggcatttcagtagttgcttttgaataatggttttggttacctgggaaggcaggcccagaacccatttncttgacttgcagttccgggctgtgttcacatgactgctgtctagctgatgcatttttcacatttgtcaactctggttagaaacaggtcctcaggagtatttctctaacctgatattttctaaaa

SEQ ID NO: 915 - DNA, 509 bp, Homo sapiens
  misc_feature 14, 15: n = A,T,C or G
ctcagacatatganncaagctctatataaatccaagacaagcaacaaacccttgatgattattcatcacttggatgagtgcccacacagtcaagctttaaagaaagtgtttgctgaaaataaagaaatccagaaattggcagagcagtttgtcctcctcaatctggtttatgaaacaactgacaaacacctttctcctgatggccagtatgtccccaggattatgtttgttgacccatctctgacagttagagccgatatcactggaagatattcaaatcgtctctatgcttacgaacctgcagatacagctctgttgcttgacaacatgaagaaagctctcaagttgctgaagactgaattgtaaagaaaaaaaatctccaagcccttctgtctgtcaggccttgagacttgaaaccagaagaagtgtgagaagactggctagtgtggaagcatagtgaacacactgattaggttatggtttaatgttacaacaactattttttaaga

SEQ ID NO: 916 - DNA, 372 bp, Homo sapiens
  misc_feature 16, 18, 28, 29, 131, 208, 265, 326: n = A,T,C or G
acaaactaaggatgcngnctatgaggcnntcatgaaagagatggaagggctactgtgacagcttttgatgccagaaaaggcttctgttcacaacagtggcccatggagaaagaggctcttattaaacttanatgaaagagctgcttccattgtcagggtattttctaatttcagttcaaggaatatcctaaaatttagccttgttcanaatttactgcacataaaaaagggtatttcatccagaatagatcagttattgaagcantgctgctaacatccattcccttttcataccaccattttcaccctgtttcttcccctcctcncagttctttggaaatttgtgatcgggggatcttagttgcttatttg

SEQ ID NO: 917 - DNA, 479 bp, Homo sapiens
  misc_feature 18, 454, 462: n = A,T,C or G
acttatttcaacaatccntagagatgctagctagtgttgaagctaaaaatagctttatttatgctgaattgtgatttttttatgccaaaatttttttagttctaatcattgatgatagcttggaaataaataattatgccatggcatttgacagttcattattcctataagaattaaattgagtttagagagaatggtggtgttgagctgattattaacagttactgaaatcaaatatttatttgttacattattccatttgtattttaggtttccttttacattctttttatatgcattctgacattacatattttttaagactatggaaataatttaaagatttaagctctggtggatgattatctgctaagtaagttctgaaaatgtaatattttgataatactgtaatatacctgtcacacaaatgcttttctaatgttttaaccttgantattgcanttgctgctttgtacctg

SEQ ID NO: 918 - DNA, 371 bp, Homo sapiens
  misc_feature 15: n = A,T,C or G
caggaccagctgggnctcaaaactttaaaaacagcaaactggaccaaaaaaatagaacaacagagaagaaaataattagcaagggaatgtcttaacatatagactagatctcttctacagcacataaacttttctagacttacaaaaaaaaaaaaaactctgatatgcccattattatctattatctctaaaaacaatccaacttctcacttggcaatcaataactatatttaatttccttcatgcaaattctcccccatcatgaaataaaacatttaaaatattcatgacaccgagcacagacttcataggttacttagatttaaaatgattatgcacacattatcataatccaattcataatgaatgtt

SEQ ID NO: 919 - DNA, 557 bp, Homo sapiens
accagaaacaaaacatgatgagaatacattgaaacactggatttacttaagaaaaacctaagtttttcaaatctaatttatttaagaaaacgtattttcttaataaatgtaacacagttcttacaaggtatggtaataagcagaaagtagaattttgaatattaatgtcaaagtatgttttctgccattttgatggagttgatactttttcttgtaagttcttcctgtagtgaaagagagaaagtgaggtgtcattgccgaaaggacacactaataacctcttggtagtttattgcaggtaaaatcattttttaattaagctgacaacgtggtaaaactgcagcattaaattgtaattatgtttaaatggaagtctttctgtagagtgttaaaggatgataaacgtttgaggttcaaataactcgactgtcttatcaaacaccatgtctataagtaataagtttctgggagaattgtgaattggattttgttttatttcaagtggatgcttttgtgcccatattttaagctgccgttgcttacaagacctgcacctc

SEQ ID NO: 920 - DNA, 503 bp, Homo sapiens
acctgtgggtttattacctatgggtttatatcctcaaatacgacattctagtcaaagtcttggtaatataaccaatgttttcaaatgtattctgtcatacaaagagcagatttttattgaacttgtgcaataactatattaccatacaatataaatattcatgaatagtttcccaagtctggagcgaccacatagggagaaaatgtaaatgtctcaatttttgttcacaaaagtatattttatcaaattgctgtaagctgtggatagcttaaaagaaaaaaaagtttcctgaaatctgggaaacaagacatttaaagaatcagcaaaatttcaaataaaaaattatgaaaatattatcctcattagttcatttagtcccatgaaattaattattttctctgcttgatcttggtggacagtttcatgaagctgtcagttagttcattaaagtttttggaaattctcagacagtgcagtggtatcagaaacttgtattcaagagt

SEQ ID NO: 921 - DNA, 282 bp, Homo sapiens
ttttttttttggctctagagggggtgctatagggtaaatacgggccctatttcaaagatttttaggggaattaattctaggacgatgggcatgaaactgtggtttgctccacagatttcagagcattgaccgtagtatacccccggtcgtgtagcggtgaaagtggtttggtttagacgtccgggaattgcatctgtttttaagcctaatgtggggacagctcatgagtgcaagacgtcttgtgatgtaattattatacgaatgggggcttcaatcgggagt

SEQ ID NO: 922 - DNA, 221 bp, Homo sapiens
acaacaggatgagactctgaaatcactttcagtattccctgctagatattgattgttatttcaagtattaagtgtaagcttttaatggataattagtataactgtggatggcatctgattttgtttttaattctgtggattgtgtttaagcaattcaatagtatgttcctgattttgagatgctaagtggtattgcacagttgtcactttatcaagtgtgt

SEQ ID NO: 923 - DNA, 202 bp, Homo sapiens
accattggtggccaattgatttgatggtaagggagggatcgttgacctcgtctgttatgtaaaggatgcgtagggatgggagggcgatgaggactaggatgatggcgggcaggatagttcagacggtttctatttcctgagcgtctgagatgttagtattagttagttttgttgtgagtgttaggaaaagggcatacaggac

SEQ ID NO: 924 - DNA, 615 bp, Homo sapiens
acacaagtgatcaatttgtcacaatatgacaagttattgataacaagtattttaacttacaggtatgataaaagtctaacatttacaaaatggggatattactatataaaaaattgaaagtattagtttttatgtaaaatattagtttcttcattctgatacagtgctaaacttaatgtaaagccaaacttcaggacctactctagacataaaataattttcatttccatgtctctagaatctaaaatgctaagtaaattttctctattacttttcgtcaaaataacttaaagtattaaaagacaacctaatgacagtaataacatttttctttcctaaaaaatatttggtatctgatttaaagacatgaataacacaatagtaacaacttaaagatcgacaagatatactaaaaatgatatttgggcatcatatctacataataattgtgaaacaactgttttcctaataactgagaagcaatcagtaactttttcataaaaggactttcatagcttctaaaatatggaattcagcactgtaaagcagaaacactaaacatgtcaaaacacctagcgtggtataggtaaccacaaatctgcaaatgacacactg

SEQ ID NO: 925 - DNA, 467 bp, Homo sapiens
  misc_feature 16, 17, 18, 150, 171, 173, 181, 183, 184, 231, 268, 269, 393: n = A,T,C or G
acaagcagacagtgannnatcatcctgccactaaaaatggtttctgaaaaataatgatgtgggaaaatacaaataattaaatgaaataaaaagaattactaagtttgatctcaagaaacactagaaaatatccttcatatggctctgagngttggaattgtggtgatgttncngtatacantnntaaatttttcgagttttctacaatatgcctatattatatagaatttnctaagatgaattaaaaataaaaaaggctaaagcatannataaccttccccaaacacacaaggattttaaataaattgaaatttcctcatactagtaattttgtgctttttttttacagatcaactggtgagactgcagtcagtgcttttgagattgacaagntgtaacccctgtctttagatttacagtccaatgcttcactcagccattttacctcaccccccaaaaaaaaaaaa

SEQ ID NO: 926 - DNA, 434 bp, Homo sapiens
  misc_feature 14: n = A,T,C or G
actacaggcgcccnccaccatgcccggctaatttttgtatttttagtagaggcggggtttcaccatattggccaggcttgtcttgaactcctgaccttgtgatctgcccacctcagcctcccaaagtgctgagattacaggcgtgagccagtccgcccagcaaggcgggtcttgctgtgtttcccagactagactggtcttgaattccagggctcaagagatctcccacctcagcctcccacagtgctgggattacaggcgtgagccgccacacccagcctattcaaaattttttttcttagagacagggtctttgttgcccaggctggactgcagtgatacaatcatagctgactgaagcctcaaattcccaggctaaggtgatcttctcacctcagccttccaagtagctgggtccgcagatgcatgccagt

SEQ ID NO: 927 - DNA, 544 bp, Homo sapiens
aaataagttatggcttaaaatgcttttggagtttatttctcaaaattaaaatctggtcacatgagctttagtttgttttctggtttaaaaaataaaaaggtttctcttaacagtatttccagtgacaatgcaaggtaagtatatcaaaggaaatcaacagttgtgcttgggggctttttgttatgggatattgatttcttgttttttttccgtaacattgtctgctgcaatttaaataaaaattacgacattttaagatatttcatagacaaaccaaacaaaaatatatgtttttactttaaagtgaatgtttttctcttcagctgatctaaaaatgaaagcaagatatcttatgtagaaatattttgataatatttttacagtgagctttcccatgtttttatgtcttaagtttctttgctgcgtttatgtaggttgcacaagaacttttactcacttgtaattgtgcctcagactttttgaaagtctaccttctaaattgccccgacgatctagattctacatgttaccattggtttattct

SEQ ID NO: 928 - DNA, 379 bp, Homo sapiens
acagcattctggaataaagcaagagtgttcattcacacacacagtagcttcaaaactgttcgatctgtttgttcccatgtagttttctaaagatggaaaaaaaggactttggtcatcaagactactgtggccatattagattactggaacatctaagcatcagtgtgtgaccatgcgaacaaaagacttcggggagtgtctatttttaaaaaggtttatgtgtgtcgaggcagttgtaaaagatttactgcagaatcaagcccacttttaggcttaggaccaggttctaactatctaaaaatattgactgataacaaaaagtgttctaaatgtggctattctgatccatagttgttttttaaagaaaaaaaatgacctg

SEQ ID NO: 929 - DNA, 523 bp, Homo sapiens
  misc_feature 15, 16: n = A,T,C or G
acaaataatagaatnnccaaaatatgtcagatacagtggaaaatgttcatatgaagtggaagatgaactgtattaagcaattgtaatacaattttagctcttgttatatacatgcctagaaaaatggcaagaagtaacctgttactctgatgggactaattcagtattttttttggcattttctagattttcttaccactaatagcaacttttataacttatgattattattatttttttttaacctttcctaatgaatctttttttttcagtaaaagaaacagtaggtcaacagaggtatattccctaagtggtgcttttattttgaaaatattgtcaatgcaatacttttttcaaaatcgaaaataaaatattttgcctacttattaaaaagaaatagtttttaccttgttctgaggctgggtaatgagaaccaaattgcaaatttgcagaatttttttcctaacattgtcaaacaattggtaatagttgtttttgagattgaacagaatttgatgtgttt

SEQ ID NO: 930 - DNA, 307 bp, Homo sapiens
acttaaatgaaaattgatcataggagaaaaatagaagttataaaatgaaaaatgtgacatgtatagatgaaaaataaacatttgaaataaaaattccatgagatagaataagttatggattttaccctaacatcagaaaatttatagaaaaaaatagaagctttccaaactaaaggacaaagggtaaactaaaataagaaagccagaaactcactgatacgtgagacaatatgcagcagtgtaacatacatgtaattaatatctcaaaaaggatgggtgggggaattatagttgaataaagagtggt

SEQ ID NO: 931 - DNA, 494 bp, Homo sapiens
  misc_feature 18: n = A,T,C or G
acacttttgttacagttncatatatgaatagttagcagaggagaaactcctccgttgttcctacaccaagggaaaaaatgtaaggactgtatagctcatgaataatattaacatttttctatcacaaaatattgataaaattggaattgtatcaattcatgttatggagcttaacattttagccgaaatattaagataatataaataaggcttttagcttcatatcaagacctatttgaacacttctagaaaagaacattaaaagttttttcctcatttatggtttgatttagtgtagtgcctcaactgttcttaatggtgtcttagtataatgcataattattagaatataattataaggcattacagaattttatgtggatacttgcaaagatatttcagtccaaaacttcaaattacacacccaaatatgtttgttgccttaatctatacttggacaaaggcaacattttaatttttgctaagtcttaact

SEQ ID NO: 932 - DNA, 195 bp, Homo sapiens; identical to SEQ ID NO: 8

SEQ ID NO: 933 - DNA, 162 bp, Homo sapiens
  misc_feature 11: n = A,T,C or G
ttcatggaccnccattcgctgttggcaagaaacggctttacttacaaaacagactctttaccttctgctgtgtttgaagtatgtttagtcagcatgctcaggaaataaatgtgaattgccctggaaaaaaaaaaaaaaaaaaaaaaaaaaaaaagcttgtac

SEQ ID NO: 934 - DNA, 500 bp, Homo sapiens
acaaaaaaagcaccagcaactgataaaaattgcttttttgtgcgctacccaactggttaaagccaatgtgatcttttatggtgaaactcctaagaaacaggtggttttgctggaaacttggtagacccttaattatagtggtgctaatgagcactactgtaatataaagccaccattattttttatcaaacatctgaatacattttacaaaggctattgtgagggcattattttgagcatctattttgaggtgatgtttaaaaaaactttaacatcaaatcaaattgtaaattaatttaaatatattgccttaaggacctactaaagaatgtgccaccagactttaagtgatagttgcaatatccttgtctaaaaaaaaaaaaaaaaagttgacttaaacattttctttaacagttgttttttttttctaaattcagtctttctcttgcttttttttccctgctattgaggaagtattttgccttccctactcactgaga

SEQ ID NO: 935 - DNA, 483 bp, Homo sapiens
  misc_feature 12, 21, 70, 117, 118, 217, 289, 374, 399: n = A,T,C or G
acagttagggtnacactttanaggtttattatttttaaaaaacttttcttgaactcctggccggcatggngaaaccccgtctctactaaaaataccaaaattggccgggcgtgatgnngggtgcctgtggtctcagctacttggggggctgaggcaggagaactgcctgagcccgggaggcggaggttgcagtgagtcgagatcgtgctactactgnctgggtggcaagggtgagactccatctcaaaaaagaaacaaaaaaacccaaaaagttttctttactgttggntaaaaaaaaaagccagaccatagtttgactggtggcatggaatttgtgtatcaaataaatgcatttgcttatttgacaaaccatnagtgtccactatttgttaccagagntgggccactatcttttaaaattgctggtgaaaacttgccactagatggcagtgcctgtatagatggggaaaaaattgccaccat

SEQ ID NO: 936 - DNA, 199 bp, Homo sapiens
  misc_feature 19, 20: n = A,T,C or G
actgcggcgggtaggcctnngactgtgggggcaatgaatgaagcgaacagattttcgttcattttggttctcagggtttgttataattttttatttttatgggctttggtgagggaggtaagtggtagcttgtgtttaatatttttagttgggtgatgagaaatagtgtaaggagtatgggggtaattatggtgggcca

SEQ ID NO: 937 - DNA, 546 bp, Homo sapiens
  misc_feature 501: n = A,T,C or G
acagatggggtcttgctatgttgcccaagctggtcttaaactcctggcctcaagcaatcctcctgccttggccccccaaagtgctgggattgtgggcatgagctgctgtgcccagcctccatgttttaatatcaactctcactcctgaattcagttgctttgcccaagataggagttctctgatgcagaaattattgggctcttttagggtaagaagtttgtgtctttgtctggccacatcttgactaggtattgtctactctgaagacctttaatggcttccctctttcatctcctgagtatgtaacttgcaatgggcagctatccagtgacttgttctgagtaagtgtgttcattaatgtttatttagctctgaagcaagagtgatatactccaggacttagaatagtgcctaaagtgctgcagccaaagacagagcggaactatgaaaagtgggcttggagatggcaggagagcttgtcattgagcctggcaatttancaaactgatgctgaggatgattgaggtgggtctacctcatctctg

SEQ ID NO: 938 - DNA, 465 bp, Homo sapiens
actcatcttttcccagatgaccaagatgctagacctgctagaggatttcttggaacatgaaggttataaatacgaacgcatcgatggtggaatcactgggaacatgcggcaagaggccattgaccgcttcaatgcaccgggtgctcagcagttctgcttcttgctttccactcgagctgggggccttggaatcaatctggccactgctgacacagttattatctatgactctgactggaacccccataatgacattcaggcctttagcagagctcaccggattgggcaaaataaaaaggtaatgatctaccggtttgtgacccgtgcgtcagtggaggagcgcatcacgcaggtggcaaagaagaaaatgatgctgacgcatctagtggtgcggcctgggctgggctccaagactggatctatgtccaaacaggagcttgatgatatcctcaaatttggcactga

SEQ ID NO: 939 - DNA, 500 bp, Homo sapiens
  misc_feature 16: n = A,T,C or G
actgtcttcccagttncgtccattctttgaattacaagatgatctaaaaccatcttctttttcgccctttcaagaatatcttcttcaactgatccctttgtaactagacgataaatattcacctgtttcttttgcccaattcgatgggctctagcctgtgcctgaagatcattctgtggattccaatcggaatcaaatataacaacagtgtcagcagaggctaaattaatccctagacctccagctcttgtggacagcaaaaagcaaaaatcctctgatccctcagcattaaaatgatctagagcttgtttcctcagttctccttttattgatccatctaatctttgaaaggggaattgacgatatttcaaatattctgcaagtatatctaacatccgcaccatttgtgaaaaaataagaactcgattgcctcgttctcttaggcgaattaatagcttgtcaagaagaatcaattttccgctactacgaattaagtgttg

SEQ ID NO: 940 - DNA, 306 bp, Homo sapiens
acgacatctcagacatgacttctattgccaggctggtcaagtggcagggtcatgagggagacatcgataagggtgctccttatgctccctgctctggaatccaccagcgggctatctgcgtttatggggctggggacttgaattggatgcttcaaaaccatcacctgttggccaacaagtttgacccaaaggtagatgataatgctcttcagtgcttagaagaatacctacgttataaggccatctatgggactgaactttgggacacactatgagagcgttgctacctgtggggcaagagcatgt

SEQ ID NO: 941 - DNA, 477 bp, Homo sapiens
  misc_feature 15, 16: n = A,T,C or G
acaaacttacagtanngtatattccaaataaaggtttttcttcctactatggtatgacaatataactgttttctgaatgaagatacatgttaaggcttaaggtgtaaacactttggaaggcaaacagcttagtgaaaaaaattatggttcatttaaaaatgtgtatcatttcataatagacccctgaactttcaaatttacatgtgagaatacatttacatcttaactttctaggaaaggcacaggctttatgtaaaaaagcagcaaagttttaaacccaccaatatattgacaaagccattacttttattagaaacaaataatgcttctcaaggtgttggcaacatgtcatagtatcaacatatacttcatacagtgtatttctccctttaattatattccggtaggaggtggaatacctccttggctatgaggggcagatgtatttgatggactgtgtaggctggttctccttgt

SEQ ID NO: 942 - DNA, 537 bp, Homo sapiens
  misc_feature 16: n = A,T,C or G
actaaaatactgtccnaattttagcatttttattttgcactttgtgtggattgaggtgttcagaaataccaaccataaaaatgtaatctagttggcaaaggtgtgcgctaaaacacggaaccgaacatgcattgatttggataacttttgagggtttttgtcaaatagcatgtgaagagttacatttttcttaaaagattggtggtcccaatgtcagagttcttggaacagataactgaatgatagatttttttttttaaagataaaactttacaacctgcacatttgttatgcatactaaatggtgtgttaaaattagggtttctttgcctctctacactacactaatctgcctaaaggtggttgtttcatatttataatgctaattatcatacctacctactttaaattttaggtagaaaattatctgatttaaatacaaacatatttttctcacattgagtaatatgcataatgtagttccaaatgtatttcattactatagtcacaatatccaactaaaaattacgctatcta

SEQ ID NO: 943 - DNA, 224 bp, Homo sapiens
atggcgctgtcgaccatagtctcccagaggaagcagataaagcggaaggctccccgtggctttctaaagcgagtcttcaagcgaaagaagcctcaacttcgtctggagaaaagtggtgacttattggtccatctgaactgtttactgtttgttcatcgattagcagaagagtccaggacaaacgcttgtgcgagtaaatgtagagtcattaacaaggagcatgt

SEQ ID NO: 944 - DNA, 329 bp, Homo sapiens
  misc_feature 16, 305, 320: n = A,T,C or G
acaatataatgtctcntcagcaaaaaaaaaaaaattgaaattacagattatttaaaacagtatcagttttctattccttcttgtatactgacattcttaaccgtcatagcagttgatgcagaaaagccgcatgtcgtgtgttagtaagtgatgccagatacaaatggtttggtctgtagagttaatgtggagctgcactgtggctgcagcaagatcataatatgcgatctgtttaataaaggttagccccatctcgggcacttctaagagtcaagagtcagggtaaccaccagaagtaaatgganagagaatggtgtcangatattggt

SEQ ID NO: 945 - DNA, 360 bp, Homo sapiens
acctggggcttttggagaacgtccgagtgcggagggcaggctacgccttcaggcaggcctatgaaccttgcctagaaagatacaaaatgctttgtaaacaaacatggcctcattggaaaggaccagccaggtctggtgtggaggtcctatttaatgaattagaaattcccgtggaagaatactcctttggtagatcaaagatattcatccgaaacccaagaacattattcaaattagaagacctgaggaagcaacgcctggaggacttggccactctcattcagaagatatatcgggggtggaaatgccgcacacacttcctgctaatgaaaaaaagccaaattgtgattgccgcctggt

SEQ ID NO: 946 - DNA, 334 bp, Homo sapiens
actcaatattataaaaacctcaaataattgacttgattttacacaacatccttcccttttctacaagttaatttttttacaaatcatttgggttatctcctaaataggttatattttattgcttctagaaacaatgtttcaaaatatatgtgcattatcagtaataatttgtataaatatttcccacaacaattttcataattttcaaagactaatttcttgactgaagatattttgctagggaagtgaaactttaaaattttgtagattttaaaaaatattgttgaatgatgtcatgcaaaggatttatatagtgtgctcccactaactgtgt

SEQ ID NO: 947 - DNA, 396 bp, Homo sapiens
  misc_feature 14, 16, 17, 96, 125, 126, 178, 260, 339, 340, 342: n = A,T,C or G
cctgtgggtttatnanntatgggtttatatcctcaaatacgacattctagtcaaagtcttggtaatataaccaatgttttcaaatgtattctgttntacaaagagcagatttttattgaacttgnncaataactatattaccatacaatataaatattcatgaatagtttcccaagtntggagcgaccacatagggagaaaatgtaaatgtctcaatttttgttcacaaaagtatattttatcaaattgctgtaagctgnggatagctttaaaagaaaaaaaagtttcctgaaatctgggaaacaagacatttaaagaatcagcaaaattttcaaaatnnanaaaattatgaaaatattatcctcattagttcatttagtcccatgaaattaatta

SEQ ID NO: 948 - DNA, 195 bp, Homo sapiens; identical to SEQ ID NO: 8

SEQ ID NO: 949 - DNA, 405 bp, Homo sapiens
  misc_feature 16, 17, 18, 386: n = A,T,C or G
acattattcatcgtgnnngcattcttgctaattttttttttggctttggaatgtgacacagcctttttgatcatttctttgatgtgaaaagcatctttggttatcagttaaattgaggtggacattatttccccaatttcacaacaggattcacattgttaatttataaatctagacttggagaattaaggactgagaaatgaccatatcttaaactatctacgacaaagtgaacttaaaaggacatgcccactgaattcaggtcctttgagtaaaaaaaaaatcttctgctgcacattttgtttaagtgttactgtttctgcctgttaatgctgggaacacaaatagtgcaatttgtgcaattggagaatcttgccttttttctnggctccccccaaaaataca

SEQ ID NO: 950 - DNA, 279 bp, Homo sapiens
acatagcataaaaactctgcagagaagtattcccaataaggaaatagcattgaaatgttaaatacaatttctgaaagttatgttttttttctatcatctggtatgccattgctttatttttataaattattttctcattgccattggaatagatatctcagattgtgtagatatgctatttaaataatttatcaggaaatactgcctgtagagttagtatttctatttttatataatgtttgcacactgaattgaagaattgttggttttttctttttt

SEQ ID NO: 951 - DNA, 616 bp, Homo sapiens
  misc_feature 583, 603: n = A,T,C or G
acttcagttggtgcacaaaatactgtcatttgctcaaagctggctgccaaatgtttggtgatgaaggcagaaatgaatggcttaaaacttgggagaagagcaaaacctgaaggggccctccagaacaatgatgggctttatgatcctgactgcgatgagagcgggctctttaaggccaagcagtgcaacggcacctccacgtgctggtgtgtgaacactgctggggtcagaagaacagacaaggacactgaaataacctgctctgagcgagtgagaacctactggatcatcattgaactaaaacacaaagcaagagaaaaaccttatgatagtaaaagtttgcggactgcacttcagaaggagatcacaacgcgttatcaactggatccaaaatttatcacgagtattttgtatgagaataatgttatcactattgatctggttcaaaattcttctcaaaaaactcagaatgatgtggacatagctgatgtggcttattattttgaaaaagatgttaaaggtgaatccttgttttcattctaagaaaatggacctgacagtaaatggggaacaactggatctnggatcctggtcaaactttanttattatgttgat

SEQ ID NO: 952 - DNA, 354 bp, Homo sapiens
  misc_feature 13, 17, 173, 180, 185, 193, 214, 226, 237, 338: n = A,T,C or G
acctgtgggtttntccncctatgggtttatatcctcaaatacgacattctagtcaaagtcttggtaatataaccaatgttttcaaatgtattctgttatacaaagagcagatttttattgaacttgtgcaataactatattaccatacaatataaatattcatgaatagtttnccaagtntggancgaccacntagggagaaaatgtaaatgtntcaattttttgntcacaaaagtntattttatcaaattgctgtaagctgtggatagcttaaaagaaaaaaagtttcctgaaatctgggaaacaagacatttaaagaatcagcaaaatttcaaatnaaaaattatgaaaata

SEQ ID NO: 953 - DNA, 419 bp, Homo sapiens
  misc_feature 13, 14: n = A,T,C or G
acctgtgggtttnntacctatgggtttatatcctcaaatacggcattctagtcaaagtcttggtaatataaccaatgttttcaaatgtattctgttatacaaagagcagatttttattgaacttgcgcaataactatattaccatacaatataaatattcatgaatagtttcccaagtctggagcgaccacatagggagaaaatgtaaatgtctcaatttttgttcacaaaagtatattttatcaaattgctgttaagctgtggatagcttaaaagaaaaaaagtttcctgaaatctgggaaacaagacatttaaagaatcagcaaaattttcaaataaaaaattatgaaaatattatcctcattagttcatttagtcccatgaaattaattattttctctgcttgatcttggtggaca

SEQ ID NO: 954 - DNA, 390 bp, Homo sapiens
  misc_feature 296, 297: n = A,T,C or G
acttgtctggtcagctgtgtatgatcagttatctacctcagagtctattttcttttgtgctgggacaggttgctggccctccctgtttccacagaccaaatcctcctagctcaggagctagggctaagcagttatttctttcaagtattttttagttcttaaattttatgcttgtatttgatgatagatgtcagtgacatttcatagtttcaaaagtccttgctgctctgagaagtgtagattctagtgaaaattacatagtcataagagaaatgtgtttttgtttttgtttttgnntcatttttttaaagttgtggtattattggttctatgctccctggaatattactgctttgtgaaagtccagactgaacgcagcaccctctgtgt

SEQ ID NO: 955 - DNA, 512 bp, Homo sapiens
  misc_feature 16: n = A,T,C or G
acctgtgggtttattncctatgggtttatatcctcaaatacgacattctagtcaaagtcttggtaatataaccaatgttttcaaatgtattctgttatacaaagagcagatttttattgaacttgtgcaataactatattaccatacaatataaatattcatgaatagtttcccaagtctggagcgaccacatagggagaaaatgtaaatgtctcaatttttgttcacaaaagtatattttatcaaattgctgtaagctgtggatagcttaaaagaaaaaaaagtttcctgaaatctgggaaacaagacatttaaagaatcagcaaaatttcaaataaaaaattatgaaaatattatcctcatttagttcatttagtcccatgaaattaattattttctctgcttgatcttggtggacagtttcatgaagctgtcagttagttcattaaagtttttggaaatttctcagacagtgcagtggtatcagaaacttgtatttcaagagcacctcg

SEQ ID NO: 956 - DNA, 445 bp, Homo sapiens
acctgtgggtttattacctatgggtttatatcctcaaatacgacattctagtcaaagtcttggtaatataaccaatgttttcaaatgtattctgtcatacaaagagcagatttttattgaacttgtgcaataactatattaccatacaatataaatattcatgaatagtttcccaagtctggagcgaccacatagggagaaaatgtaaatgtctcaatttttgttcacaaaagtatattttatcaaattgctgtaagctgtggatagcttaaaagaaaaaaagtttcctgaaatctgggaaacaagacatttaaagaattagcaaaatttcaaataaaaaattatgaaaatattatcctcattagttcatttagtcccatgaaattaattattttctctgcttgatcttggtggacagtttcatgaagctgtcagttagttcatt

SEQ ID NO: 957 - DNA, 574 bp, Homo sapiens
  misc_feature 519: n = A,T,C or G
accttatattgaaaaagtttataaaacataattcctaaaaacaacctcaacattagacaatagaggaaggaaaaacatcagacaaagcctaagttttcacatgagaaactaagtatgttcttaaagctccagtattacattccttgaaaaaactcagaatgcactttggtcattattaaacatatttgaacataggcaaataaaatgaaatgctttctgttgtttttcatagaaagaaaaaacatactacacaatgaggctgaattgaggctgatcaaaaggaatggtaagagcaaagtgatatgacatggctctgttctccacacattcctgattttaagattatgatttagggattagaactgcaccaatcaaataaattatttacaattaatcgtcttaaagttcttaaaatatggtaaaaatatgaggatattccacatgatacactttgcaccaagaaaattctagattgtttcaaataaatttttagaaaccagatgcccagtttaaaaaaanttgcaaaaactgttttcatgtttcatgtaatttctaaaatactcgattgtacctg

SEQ ID NO: 958 - DNA, 502 bp, Homo sapiens
  misc_feature 451, 464: n = A,T,C or G
actacacgcgcctgggcaacgacttccacacgaacaagcgcgtgtgcgaggagatcgccattatccccagcaaaaagctccgcaacgagatagcaggttatgtcacgcatctgatgaagcgaattcagagaggcccagtaagaggtatctccatcaagctgcaggaggaggagagagaaaggagagacaattatgttcctgaggtctcagccttggatcaggagattattgaagtagatcctgacactaaggaaatgctgaagcttttggacttcggcagtctgtccaaccttcaggtcactcagcctacagttgggatgaatttcaaaacgaacaagcgcgtgtgcgaggagatcgccattatccccagcaaaaagctccgcaacaagatagcaggttatgtcacgcatctgatgaagcgaattcagagaggcccagtaagaggtatctncatcaagctgcangaggaggagagagaaaggagagacaattatgttcctga

SEQ ID NO: 959 - DNA, 509 bp, Homo sapiens
  misc_feature 16, 17, 183, 221, 228, 353, 427, 428, 446: n = A,T,C or G
actcattgtcagatgnnccctctgagagcacagaggaggcaaaagcttctgtgggatgtgctagtcggctaaagcttcacagaggaggtggcaattgaaaatgagtcctgaatggggtagggtggttagggaattccatgagacaagacaaggggggcatggtgtgagaaaggcatggaagtnggaaccctcttcctatgacaggagatcattctgcttanagtgganagtgtggagagtgggagtagataattttggaaagctgggtgaagccagttgtggagaattgtttgaatattatcccattgaatacccagagccactaaatctttttttttactagaaaataattngggtccatatgaaagtctctattactgagtagtgtcaatgagggtgtggcaaaatggagcctttcacatcctannggtggccatttggtaatnacagatataagccttaaactatgtaaacccttgtcccaaaggaagtaattgaataaattgccc

SEQ ID NO: 960 - DNA, 220 bp, Homo sapiens
  misc_feature 20: n = A,T,C or G
actcaaaatataagcagctngaaactggctttaccaatcttgaaatttgaccacaagtgtcttatatatgcagatctaatgtaaaatccagaacttggactccatcgttaaaattatttatgtgtaacattcaaatgtgtgcattaaatatgcttccacagtaaaatctgaaaaactgatttgtgattgaaagctgcctttctatttacttgagtcttgt

SEQ ID NO: 961 - DNA, 495 bp, Homo sapiens
  misc_feature 14, 15, 364, 402, 409, 413, 419, 430, 438, 455, 473: n = A,T,C or G
attacctatgggtnngtatcctcaaatacgacattctagtcaaagtcttggtaatataaccaatgttttcaaatgtattctgtcatacaaagagcagatttttattgaacttgtgcaataactatattaccatacaatataaatattcatgaatagtttcccaagtctggagcgaccacatagggagaaaatgtaaatgtctcaatttttgttcacaaaagtatattttatcaaattgctgtaagctgtggatagcttaaaagaaaaaaagtttcctgaaatctgggaaacaagacatttaaagaatcagcaaaattttcaaataaaaaattatgaaaatattatcctcattagttcatttagncccatgaaattaattatttttctctgcttgatcttggnggacagntttnatgaanctgtcagtttngtttcatnaaaagttttggaaattntcagacagtgcagtggtntcagaaacttgtattcaagagt

SEQ ID NO: 962 - DNA, 385 bp, Homo sapiens
  misc_feature 16, 17: n = A,T,C or G
actgtagaatgtttgnnatacagtatttgtaaaattgatatgaaaaataatttctcaaagtctattgtttgatctagttattttaataaaggaactctagaagtttcaagtggccagtgaagtgtgaggaatagagagtaaaggaaataattaataatggtgaccctctgttaagtggtttactttttccattaatataaatttcatttggaaagattaaaaaaacaagtttgattgaacttgataaatcagaaatatttaccagctttgtcgatggtgtattcttgaaaaatgtttggttttctttcaggttgacttatatccaaaattctacaaattcttagctatgttataaatgtagaaagaagtgaaaaatcaaaatatg

SEQ ID NO: 963 - DNA, 539 bp, Homo sapiens
acacttggagctaggaaaccaaagcaagctttgtgaaactggcacagtgatagagaattgctgtggagagttatagagcaaagggatgggtccttgaggcctgccagtgtgtaaaggtgttcaaataaagggctgtttctacaggtaacattaaatgtgaactcaacacttccagagtctttaaagggtttctatgtgtatcggtgtaatagtgttttaccaccaactgcctttctttgttcctagttactgtaacaaatatttgatgatagaggtttattaattttgtttatccagaccattaattttatttgtttttgttctatgtaatcaaataaaatttgagtaacatgtaatggtaaggattaatgcatggttatttggaccagaaaaaagtgccatagaagaccaataactgtttagttgaggctagtctggaacctttcattagagcaatatttggttattgcacttcatttttatttactaagaaatgcaattttgggaattttttaacctgttatgctttgttatcaacc

SEQ ID NO: 964 - DNA, 259 bp, Homo sapiens
acccagccctgctgcagcgcaacggctcctttgccaactttctctgcaactatgcccccgatgaggaccaagggcacctggaggacagctggaccgcgttggaaggtgcagaggataaggaggcactgctgattgaagacacactcagcaaccacacggatctgacagacaatgatccagtcacctatgtggtccagaagcagtttatgagacagctgagtgccctgtcctcagatggggagggacagggtcggcctgt

SEQ ID NO: 965 - DNA, 418 bp, Homo sapiens
  misc_feature 246, 253, 257, 382, 400: n = A,T,C or G
ctgctaatacaatgccagtcaggccacctacggtgaaaagaaagatgaatcctagggctcagagcactgcagcagatcatttcatattgcttccgtggagtgtggcgagtcagctaaatactttgacgccggtggggatagcgatgattatggtagcggaggtgaaatatgctcgtgtgtctacgtctattcctactgtaaatatatggtgtgctcacacgataaaccctaggaagccaattgatntcatagntcanaccatacctatgtatccaaatggttctttttttccggagtagtaagttacaatatgggagattattccgaagcctggtaggataagaatataaacttcagggtgaccgaaaaatcagaataggtnttggtatagaatggggtntcctccttcggcggggtc

SEQ ID NO: 966 - DNA, 342 bp, Homo sapiens
  misc_feature 198: n = A,T,C or G
actatgttatgcacacattacaaataatataaggggaagttttattagcttagtaggaaattgttattattaaggtttaaaaatgagaacaggtgtgagttttccaaaatacttaaaaataatagtgtcaaaaattcaggggcagttaaggagtcatggatggaactagaggtcactatattaagtgacataagccanaaacagacaaacattgcatgttctcaattatttgcgggatctaaaagtcaaaacaattgaactcatggatatagagagtagaaggatggttactagtggctgggaaaaggggtgtgcgaggggaactggggatgcttaatgtgt

SEQ ID NO: 967 - DNA, 251 bp, Homo sapiens
acatcttccagagctgttttcatctctgcctacaggggtaaagtccgcatggaattagagggggaaagtctgcactggaacctgctgtggccattttttttctgttgttgctgcttctctagtggagttactgcagcttagggatggttcctggaagtggacacattttacaaaaacgttttttaaatacacgccagctcttcgagaagcacttttttccttccgtcatgcttcatactatattgtattgt

SEQ ID NO: 968 - DNA, 413 bp, Homo sapiens
  misc_feature 404: n = A,T,C or G
cctatgggtttatatcctcaaatacgacattctagtcaaagtcttggtaatataaccaatgttttcaaatgtattctgtcatacaaagagcagatttttattgaacttgtgcaataactatattaccatacaatataaatattcatgaatagtttcccaagtctggagcgaccacatagggagaaaatgtaaatgtctcaatttttgttcacaaaagtatattttatcaaattgctgtaagctgtggatagcttaaaagaaaaaaagtttcctgaaatctgggaaacaagacatttaaagaatcagcaaaatttcaaataaaaaattatgaaaatattatcctcattagtttcatttagtcccatgaaattaattattttctctgcttgatcttggtggacagnttcatgaag

SEQ ID NO: 969 - DNA, 341 bp, Homo sapiens
  misc_feature 12, 13, 14, 169: n = A,T,C or G
acccgtgggtcnnntacctatgggtttatatcctcaaatacgacattctagtcaaagtcttggtaatataaccaatgttttcaaatgtattctgtcatacaaagagcagatttttattgaacttgtgcaataactatattaccatacaatataaatattcatgaatagnttcccaagtctggagcgaccacatagggagaaaatgtaaatgtctcaatttttgttcacaaaagtatattttatcaaattgctgtaagctgtggatagcttaaaagaaaaaaagtttcctgaaatctgggaaacaagacatttaaagaatcagcaaaatttcaaataaaaaa

SEQ ID NO: 970 - DNA, 595 bp, Homo sapiens
  misc_feature 16, 17, 18: n = A,T,C or G
actttcctagatgacnnntcgagtcaacatgaagccttagctaaaatgaatgattcaggatattaatgagaaattctcacaaatgatatgcatttaggaaatgattttgctttccttaaatagttcgaaggcttgaaaataaactttttttttgcatttcttttagaatgtttggtcattaacaacttttaaccttatcttcctcttctccttagcccttaacagaccgagtccattctatttggaaataacaagaacttgatcagattattaaatcttggaaacctcatttttaccttataaagtgttaagtttcacgtgcatattctcttacaaatgtagtataaatgttatggatagatataaggaaatattggcatagtataggtaattagtgaaaagacacaacttcacaaaacataataaaagataaacatgaaactataacactacttaaaaaatattttctcccaaaatttattttagcatttttgactagtttaataatatgaacactgccaaaaaatgggtttcaaagtcgcctggagaaacagttttcttcttctggagtccatctcagcagcagcgattttct

SEQ ID NO: 971 - DNA, 530 bp, Homo sapiens
  misc_feature 462, 478, 479: n = A,T,C or G
actccagcttggacgacagggcaagactctgtctcaaaaaaaaaaacaaaaaaaaaaaaaacaaagcagaagcattcttaccactgagttttaagaaggaaaaaaaaaagcaggttaaaattacttcagaaaagagagtcataatgagataaacatatcactttaaacgtaggcgtaattgaagatgtcttttagagatagattaatattgttttacttaggttaaatagaacaccattgaaagcttaatgtcacagattcacatttatgtaaatccttaacctctaaagtttttagaagcctaaattaaacatgattgattatcatctaaagctaatgttatttctgtctcctaacgtcagtaatatgaattgtaatgtgaattgttgaactttgatagtattttttaagtttaaaaatgtttttcttattagagtagtatagtattacatatttatggtngaatacagaaaagaanngagtgaaaatcatcccttgaatcacctaaatcctaaaataatgactaccta

SEQ ID NO: 972 - DNA, 546 bp, Homo sapiens
  misc_feature 20, 457: n = A,T,C or G
acttcagttggtgcacaaantactgtcatttgctcaaagctggctgccaaatgtttggtgatgaaggcagaaatgaatggctcaaaacttgggagaagagcaaaacctgaaggggccctccagaacaatgatgggctttatgatcctgactgcgatgagagcgggctctttaaggccaagcagtgcaacggcacctccatgtgctggtgtgtgaacactgctggggtcagaagaacagacaaggacactgaaataacctgctctgagcgagtgagaacctactggatcatcattgaactaaaacacaaagcaagagaaaaaccttatgatagtaaaagtttgcggactgcacttcagaaggagatcacaacgcgttatcaactggatccaaaatttatcacgagtattttgtatgagaataatgttatcactattgatctggttcaaaattcttctnaaaaaactcagaatgatgtggacatagctgatgtggcttattattttgaaaaagatgttaaaggtgaatccttgtttcattctaagaaa

SEQ ID NO: 973 - DNA, 284 bp, Homo sapiens
  misc_feature 19: n = A,T,C or G
accttgtaatgaagaggcngctgatgccatgcacttgtctgagggcatagctccatgtcttctgacattcctggtgtcccaaagaatagcaaaaagccagtttgaatattatgtaacttatttttttaatgtggacaggggaccttgaaaatcactaagttattaaaaatgtggatgtgctagaattggatatgtccaggaacatgggaagggctcactattggaatcccatgagtttccattttgtctctacccaaacgtattccaaagctgactgcatttgt

SEQ ID NO: 974 - DNA, 489 bp, Homo sapiens
  misc_feature 286, 454, 455: n = A,T,C or G
tgtagcaagagaaaaaccttatgatagtaaaagtttgcggactgcacttcagaaggagatcacaacgcgttatcaactggatccaaaatttatcacgagtattttgtatgagaataatgttatcactattgatctggttcaaaattcttctcaaaaaactcagaatgatgtggacatagctgatgtggcttattattttgaaaaagatgttaaaggtgaatccttgtttcattctaagaaaatggacctgacagtaaatggggaacaactggatctggatcctggncaaactttaatttattatgttgatgaaaaagcacctgaattctcaatgcagggtctaaaagctggtgtttattgctgttattgtggttgtggtgatagcagttgttgctggaattgttgtgctggttatttccagaaagaagagaatggcaaagtatgagaaggctgnnataaaggagatggttgagatgcatagggaactca

SEQ ID NO: 975 - DNA, 209 bp, Homo sapiens
actgtcttctttagatagagacgctataaaatttggctatcagtgagtaaatattagaatggccaagtttgccacttaattcatcccagaagaggaaaaataatagaagttgattaaatattttaaaatttaaaaatttttaaaaatttgagtatcaatacattattgcttataaatttcatgacattttcatatataaagtaaaaaat

SEQ ID NO: 976 - DNA, 332 bp, Homo sapiens
actatattcaagccactttcatatattaactagataaaaggataccatactgctatttgaaattcaatcacaaagcaaaaatgtcataattttaatgtattttaagggaagacggggttcttaacatgaatatgtaatacaaaaacaattctaaataataatatttaatagaagaaaaaatctgtataattatttagaagtaactctgtttttaaaatttcaatgttaggaagaaaatcccttaaatttgaaatagcggaatattctctcatatgaaaaaactgtgtcccagtgttattcttcaacttagaaattaggcaaagtattttagt

SEQ ID NO: 977 - DNA, 372 bp, Homo sapiens
  misc_feature 15, 16, 111: n = A,T,C or G
cccatttcaggaatnnaaaattaagtagaacaaaaaaacccagcgcacctgttagagtcgtcactctctattgtcatggggatcaattttcattaaacttgaagcagtcgnggctttggcagtgttttggttcagacacctgttcacagaaaaagcatgatgggaaaatatttcctgacttgagtgttcctttttaaatgtgaatttttatttctttttaattattttaaaatatttaaacctttttcttgatcttaaagatcgtgtagattggggttggggagggatgaagggcgagtgaatctaaggataatgaaataatcagtgactgaaaccattttcccatcatcctttgttctgagcattcgctgt

SEQ ID NO: 978 - DNA, 280 bp, Homo sapiens
ttttttttgactctacagggggtgctatagggtaaatacgggccctatttcaaagatttttaggggaattaattctaggacgatgggcatgaaactgtggtttgctccacagatttcagagcattgaccgtagtatacccccggtcgtgtagcggtgaaagtggtttggtttagacgtccgggaattgcatctgtttttaagcctaatgtggggacagctcatgagtgcaagacgtcttgtgatgtaattattatacgaatgggggcttcaatcgggagt

SEQ ID NO: 979 - DNA, 399 bp, Homo sapiens
  misc_feature 8, 9, 282, 283, 291, 300, 315, 339, 351, 355: n = A,T,C or G
accttatnngtttccccttccttgtcagcgtcgggaagatggtatgaagtcctctttggggcagggactctagtagatcttcttgtcagagaagctgcatggtttctgcagagcacagttagctagaaaggtgatagcattaaatgttcatctagagttaatagtgggaggagtaaaggtagccttgaggccagagcaggtagcaaggcattgttggaaagaggggaccagggtggctggggaagaggccgatgcataaagtcagcctgttcaaagtgctcnnggacttancaaaatganaagatgtgacctgtnccaaaaactatttttgagaatttnttaaatgtgacncatnttttctggtttatgaataaacttacagcaacaaataatcaaaga

SEQ ID NO: 980 - DNA, 298 bp, Homo sapiens
  misc_feature 33, 36, 39, 87, 216, 249, 250: n = A,T,C or G
gaacccgtggtcctccgcttcatgattttctgncgnctnttggcaaaaatggcaaataatgatgctgttctgaagagactggagcanaagggtgcagaggcagatcaaatcattgaatatcttaagcagcaagtttctctacttaaggagaaagcaattttgcaggcaactttgagggaagagaagaaacttcgagttgaaaatgctaaactgaanaaagaaattgaagaactgaaacaagagctaatnnaggcagaaattcaaaatggagtgaagcaaataccattttccatctggt

SEQ ID NO: 981 - DNA, 143 bp, Homo sapiens
  misc_feature 90, 129: n = A,T,C or G
acttttcctggactttgcctggacttttttctcccaaattagtatattctagtcatgcctaactatgctattctttgtctagatgaacangagaactgggcaacccatgatccacatctacctggacanggaaacaggaaagc

SEQ ID NO: 982 - DNA, 413 bp, Homo sapiens
  misc_feature 180, 181, 283: n = A,T,C or G
actgaggaaatattttgtaaagtgagctttgggtataacttagccccatcattatttagagaatagaggaggaagaaagaggaaggattttaaaggcagacaatgacagaccattcaggataggtagggttttaaagggagataaacacagtctcatcaactaaggagagatttgctgcnntaaataggatgagggaaatagtctgtgggatgcaagcaaaggaagcagggtgccttagacactgagtggagccagaaagatcatgcggcctttttccaagtncatggccaccaagtaagaatggttggttgacaagacaggaggctaaaacaggaaggtaatcttgtgcacctgacaaatagaaagaataaaggatcaaaattgaaggcaggctataagagtatcaagaaat

SEQ ID NO: 983 - DNA, 484 bp, Homo sapiens
  misc_feature 14, 204, 286, 325, 362, 369, 378, 422, 439, 440, 444, 458: n = A,T,C or G
acaaggtgcaaatnggaattccgattttagggcaacttttcagaggttgacagttaagtatttggggcatgcacaaatgtgatagttattttgctggaggtgacaggtatctcttaaatatcaacaatgccttttagttttcagtatgagatatagaaacagtctataatggagtaacattttaatgtctcaccattagagaanttggaaattaacatacatatgagactcctgcgttttagttaattggagaataagaatggctaatgtttctttgaggaccagncagtgattaccctatcactgagattgaataaattgtttnaaacatctttatttttgttgtattaaaattttaggtntaaattnatatatgcnatgattagatattgaaggttgtgaaatgtgaatgaaaacgtgtnaagtgaggcttcacaannaatnttattctctgtgtntcaaaagtatttgtcctattttaaaa

SEQ ID NO: 984 - DNA, 279 bp, Homo sapiens
  misc_feature 11, 159, 160, 225, 237, 247: n = A,T,C or G
acattcactangggcaaatgggtttttctaaataaatgacataaaaaagaactggttgtctttctttaaagaaagtcttagttacaggattctgtgattaaaatccttaaatattgggttgccttctgcagctgtagtatcagtttttgaaccacagtnntgggaagaaagacaaatggattcccttagaagtaagatttctatttgcaggatgagttgggcatnggaaagggtcanggttcatcangtgaactcaacactgggatgagactagaactt

SEQ ID NO: 985 - DNA, 453 bp, Homo sapiens
  misc_feature 300: n = A,T,C or G
accggtttttgtatataaaattcatgtttccaatctctctctccctgatcggtgacagtcactagcttatcttgaacagatatttaattttgctaacactcagctctgccctccccgatcccctggctccccagcacacattcctttgaaataaggtttcaatatacatctacatactatatatatatttggcaacttgtatttgtgtgtatatatatatatatatgtttatgtatatatgtgattctgataaaatagacattgctattctgttttttatatgtaaaaacaaaacaaganaaaatagagaattctacatactaaatctctctccttttttaattttaatatttgttatcatttatttattggtgctactgtttatccgtaataattgtggggaaaagatattaacatcacgtctttgtctctagtgcagtttttcgagatatt

SEQ ID NO: 986 - DNA, 475 bp, Homo sapiens
  misc_feature 469: n = A,T,C or G
acctttttttaaggagtgtaaactatgatatatgatttaagtaatcacttatttgaatgcaatattgattcagataggcataatctattcatttttcataatgaaatgtatattcctatttcaacactttatgcagattttacttatttcttacagggctgctgtgtggattcaatggcttatctatgtaagtgtccagcacagtatctggcacatagtaagcttttagtgtatgctacttatttatattaagtgagtcaatctgtcacttataatagaaaaactatctaatgcctcaggagaataatcaaaagataaacctacagatgtgtgacttctgttaaagtattatgcatccactatttcccaaattactaaactaattgttttaaaatgttacaatctatttttaagatcatatttgttctctatgtttttgctatggcctttggcctaaaccaatacaatnctgaca

SEQ ID NO: 987 - DNA, 444 bp, Homo sapiens
  misc_feature 427: n = A,T,C or G
acaaaaaagaactacttgtattctagaagaaatatgaaatgcttaatttataagcgggctggagattttttccaatattgttttctttgaaaatgaaaggggatcatctattttagttttggggtctgggaactttttgaaaatttaatttgtggaccaatgttttgtgaaagctaaagagggcaggggttaaaatagggcttgaatttctcattctgtatagaccagcaaacttccctgtgcaaggcaagtttacatcacaaatccaagaatgtttgcatcctaaatgctagtttgcttcagcccctagttaacctcaggacttggtttgcatataaaaggtagacagctgatatgttttcatgaataaatattgttcagccagaaaaggttggtgtcaggtaatgcatatttttttaagctttgntttatatttatttttca

SEQ ID NO: 988 - DNA, 464 bp, Homo sapiens
  misc_feature 16: n = A,T,C or G
accaattctctcttantttctttttttatagttggtttattttgcaattataaatgttaaacatccctagagatgaaagttaaaatggttgatcacagatcagtagcaaaatacaaattgacaattcaaaattataaataaaactctgttgaggatgtttaactttgagtctccaaatttaagagctaagcttggaagaaacaaatttataggttatatttccctcttaaattaaaaaacaaacttcctctggcagtagtttgtgaattcctttcattgtaatgataccatgattacaggatcaaaaatgcttaacttacttgccattctgctcacatcatcacagttgttttttttttttttaagcactcaatgtaggcattttaatcttctggataacagagtatcttttgagaaattaaaatcgaattgaccatttgcaatatttggttttcctaataggt

SEQ ID NO: 989 - DNA, 388 bp, Homo sapiens
acacaagattaacactacttatgaaatatggacaaatatattactactcattataacccatccagattattagtttaactcattcaattactacaaagatccttacagagctgaatttaatatacaatagaacatcactgccctctgatggtatcactaatatataattttaaattcagcaaacaaaaaatcctttatcataaagtaaaacagggtatgttaattttataagctacataaataaaaataaattggaaaaaattttacatctgcctaagaatactcattactaagttataaaaatttacagtgctccttcacatcagcccttcaaatgattttttcaagattctccctgatgatcagtttaaaggcactatgaagatgt

SEQ ID NO: 990 - DNA, 343 bp, Homo sapiens
gaccagaagcctgcatttctgcattctgcttaattccctttccttagatttgaaagaagccaacactaaaccacaaatatacaacaaggccattttctcaaacgagagtcagcctttaacgaaatgaccatggttgacacagagatgccattctggcccaccaactttgggatcagctccgtggatctctccgtaatggaagaccactcccactcctttgatatcaagcccttcactactgttgacttctccagcatttctactccacattacgaagacattccattcacaagaacagatccagtggttgcagattacaagtatgacctgaaacttcaagagt

SEQ ID NO: 991 - DNA, 466 bp, Homo sapiens
actaaacccccgctgaccaaggatcgaggagtagctgccagtgcgggaagtagcggagagaacaagaaagccaaacccgttccctgggtggaaaaatatcgcccaaaatgtgtggatgaagttgctttccaggaagaagtggttgcagtgctgaaaaaatctttagaaggagcagatcttcctaatctcttgttttacggaccacctggaactggaaaaacatccactattttggcagcagctagagaactctttgggcctgaacttttccgattaagagttcttgagttaaatgcatctgatgaacgtggaatacaagtagttcgagagaaagtgaaaaattttgctcaattaaccgtgtcaggaagtcgctcagatgggaagccgtgtccgccttttaagattgtgattctggatgaagcagattctatgacctcagctgctcaggcagctttaagacgtacct

SEQ ID NO: 992 - DNA, 422 bp, Homo sapiens
actacataacacattactatactactacaaaatatccttctctataaatgcactgaatattttcttgggcattttattaggccttttttagcattattacaaatgctaacaacaagatacttcaaaccaccaaatataaagtcagcttcttaattttctgaaatttagttatttgagttaataagaattctgtaggaatactgacccatctcttttcatccaaccttcaaaatagttaagcctatttgcccatctcacctaaccttcaaaatagttaaaacaaaaacaaacccaaactagctatatataacaagaatctttcaattcccaaactattgaaagaccctaagtcagccaatctatgaaattatacaagatgaaggtgaaaaagctgtgctttttttttaaaccattaaacccag

SEQ ID NO: 993 - DNA, 475 bp, Homo sapiens
  misc_feature 12, 15, 239, 288, 432, 439, 440, 466: n = A,T,C or G
acctgtgggttnatnacctatgggtttatatcctcaaatacgacattctagtcaagtcttggtaatataaccaatgttttcaaatgtattctgtcatacaaagagcagatttttattgaacttgtgcaataactatattaccatacaatataaatattcatgaatagtttcccaagtctggagcgaccacatagggagaaaatgtaaatgtctcaatttttgttcacaaaagtatattnttatcaaattgctgtaagctgtggatagccttaaaagaaaaaaagtttnctgaaatctgggaaacaagacatttaaagaatcaggcaaaatttcaaataaaaaatttatgaaaatattatcctcattagttccatttagtcccatgaaattaattattttctctgcttgatcttggtggacagtttcatgaanctgtcannttagttcattaaaagttttggaaatntctcagaca

SEQ ID NO: 994 - DNA, 362 bp, Homo sapiens
tcgagcggccgccggcgggtacaacaaaaaagggcattggcccagtttattcgtccaaagctgctcggagtggactcaggatgtgcgaccttgtttctgactttgatggcttctctgagaggtttaaagttctagctaaccaatacaaatctatataccccactttggaaatagacattgaaggtgaattacaaaaactcaagggttatatggaaaagattaaactaatggtgagagatggagtttattttctatatgaggccctacatggaccaccaaagaaaatcttggtagaaggtgcaaatgcagcactattagatattgattttgggacttacccttttgtaacctcttcaaattgt

SEQ ID NO: 995 - DNA, 370 bp, Homo sapiens
  misc_feature 18, 21, 188: n = A,T,C or G
acttatttcaacaattcntanagatgctagctagtgttgaagctaaaaatagctttatttatgctgaattgtgatttttttatgccaaattttttttagttctaatcattgatgatagcttggaaataaataattatgccatggcatttgacagttcattattcctataagaattaaattgagtttanagagaatggtggtgttgagctgattattaacagttactgaaatcaaatatttatttgttacattattccatttgtattttaggtttccttttacatttcttttttattatgcattctgacattacatatttttttaagactatggaaaaataatttaaagatttaagcctctggtggatgat

SEQ ID NO: 996 - DNA, 172 bp, Homo sapiens
gggtttatcacctatgggtttatatcctcaaatacgacattctagtcaaagtcttggtaatataaccaatgttttcaaatgtattctgtcatacaaagagcagatttttattgaacttgtgcaataactatattaccatacaatataaatattcatgaatagtttcccaagt

SEQ ID NO: 997 - DNA, 257 bp, Homo sapiens
  misc_feature 10, 54, 196, 202, 210, 211: n = A,T,C or G
tttccctgcntagtagaacaaaacagccctgtgcctttgctagagaaccgacantcaaacccttttctgtggaggatcaaggctgcctcattggagtgcccattgcccacctttgactgtattgttctcaaattaaccagatgaatgtcacaaggcaaagatgactgtaatggagagaattcaccttgcagctcangggtangtgaggannaacttatttgccattggaatgactggatgattcatgagtagaagaa

SEQ ID NO: 998 - DNA, 183 bp, Homo sapiens
acgcatcatgtggtctcagcgtgatccatcacttcgcaaaagtggagtaggcaacatattcattaaaaatctggacaaatccattgataataaagcactgtatgatacattttctgcttttggtaacatcctttcatgtaaggtggtttgtgatgaaaatggttccaagggctatggatttgt

SEQ ID NO: 999 - DNA, 369 bp, Homo sapiens
  misc_feature 274: n = A,T,C or G
acttctggaaaaaaatgcaaatggtttagccaggatctttcctgtctgattcgtcactattattatatctgatgatgcgaatggttggagcgattcaatcctaagtcattaatgagctattttataaacaccactgtctgaagatcttcatttacattttgctaaggatcacttcgctaacctcacaggcttgtgtcaacagcatgatttgcaggacttcagttacactcttataaacaacacggctgtattgttaatcggttaatattttatnaagtgtaaatattttattatgttttgaagggaactattgattctaaattattaaacccctgagaaggactatttaaatgaaatatacaattaagt

SEQ ID NO: 1000 - DNA, 349 bp, Homo sapiens
  misc_feature 115, 142, 144, 212, 215, 326: n = A,T,C or G
acaagctttttttttttttttttttttttttttgggattttaaaaatatttattacatttgtttctagaaatcatagaaaataaaaattgatacaattttgatatacaactttanaaaggcatatttatcctttcacaccananaagtttatgcaatgccagacatggaaataccaaagccactggtgacaaagggtaaacgctactgatanaanaaagccttgtccatttttatagttttcttctctaccattatttatttttgagcaaataccagtccagtggaaagagttctgaacataaaaggcacctagagtaaaaattanaccttaactaataaaacagctgt

SEQ ID NO: 1001 - DNA, 482 bp, Homo sapiens
  misc_feature 14, 456: n = A,T,C or G
acatctgtgtgccncgctggggcagactgtgccaatgctcaccaaacactagaatctgctcttacacctctagcatgtatctcgttgtagcagagttgtgcactttctcagcattgtgtagtgttttctaattgcatctaaaaacttatcaaaagtgattgtgaaaacagtgtcttagaagtataaacagaaatggcaatatttatgtcctgtgattcaagcccaaaggttataaattcaactttcacagggaatagcactgctaatcttactttatgatttaaatataaaggaaaatcacagcagccttaatttcctgttggtcggatcatttgcagcagttctagttcctgacttttaaaatggatgaaattttctctttgtctgattttggaaaaggaactgcttttttgccttactgctttggtataaggatgaaaaacatgagcactctgnagacaaaatgaccttaaatcacattg

SEQ ID NO: 1002 - DNA, 507 bp, Homo sapiens
  misc_feature 446, 492: n = A,T,C or G
gggggcccaagtccttctgatcgaggcccagcccctacccccaacagagagcctgccaatggcaccaacccctctgctgagctgcaccgtagtcctagcctcctataaggcccaggaagagggcagaggggccagaaggactccatggcccaaagaccctcctccctgcaggcactgtgggaacagacacagagatggagaagcagggacatgctgagaggacgaagccaaggaaattagggaggagagtcaaagggatcaaggagagttggggatttgagctgcagcagagagggatgagggatttagccctctgccctaaggtgccattgaaaagggacaggacccttcggaggtgcctgtgaggagaggggagcaggacctctccctcctccagatccctgcctcctagtgccagcccctcacacgccttcatcctgaaacangaagaggacggcaccaagtttgggggtgctggatgaaagagacgangggtgatctgtgagt

SEQ ID NO: 1003 - DNA, 213 bp, Homo sapiens
  misc_feature 12, 13: n = A,T,C or G
ctatttcatgtnnttgatcaaaaactatttgggatatgtatgggtagggtaaatcagtaagaggtgttatttggaaccttgttttggacagtttaccagttgccttttatcccaaagttgttgtaacctgctgtgatacgatgcttcaagagaaaatgcggttataaaaaatggttcagaattaaacttttaattcattcaagaaaaaaaaaa

SEQ ID NO: 1004 - DNA, 186 bp, Homo sapiens
  misc_feature 78, 118, 119: n = A,T,C or G
atgagtttgctaatacaatgccagtcaggccacctacggtgaaaagaaagatgaatcctagggctcagagcactgcancagatcatttcatattgcttccgtggagtgtggcgagtcnnctaaatactttgacgccggtggggatagcgatgattatggtagcggaggtgaaatatgctcgtgtgt

SEQ ID NO: 1005 - DNA, 221 bp, Homo sapiens
  misc_feature 114: n = A,T,C or G
tccaggagaccgtgcctgttccccacacacatgcgcccgatgatgcggcagccggcgatagacgcgtgcaccacggggatggtatcggagagctcgccctcgaacacactgtanaagttctctgagcctccgatcgctaccagacagtaggtgttggtgagcttggcaaagcagccgatctcacagttgttctcgaacgaagctcggaccgccatgaggcc

SEQ ID NO: 1006 - DNA, 482 bp, Homo sapiens
  misc_feature 13, 427, 451, 475: n = A,T,C or G
actttggcttttntttctttttttttgcacagaataataaatgaatccatgtagaaatgacctggaacaaaacatcttggtccattttgcctattgatttagtgataactatacatataattttatcttgctccatggcatttttataacataacatcattcaacataaatgtcctgttactattgacgtcacacaataaacacattaacagttctatcaatatcctcattcttctaaactgcattttaaagttgaaaacacctttttttaaaaaaagtaaatatatttcatttaaaaatttaatctcaattcaaattttttcagatatattctcagtaaaaatatactttggatcagattgactatttaaatgaattttatatatatatataaacacacacattaacagtttaaaaggtaaatgtntttttgcaaaagaagagaaattanggagtgctctgaaattcagtgtantgatgca

SEQ ID NO: 1007 - DNA, 468 bp, Homo sapiens
  misc_feature 17: n = A,T,C or G
acctgcaaattcttaanaatacctttaccaccagattagaacagtaagcataataaccaatttcttaataagtaatgtcttacaaataaaaacacataaaaaatagctttaaatgcattcttcacaagtaattcagcatatatttttatatcatgtttacttatgcttaagaattaaagcaagtatatttattactctgatggaaatatgggaaatctctcattcatgcaatatacagggataatattcaagcgaagggaaaattcccgctttttatttttgttaaatgtatccatatataatcatcgacatgacagatgaggaaacccatgaagtttcccactagtcagatatacattttcacttcatcagaagcacctgatatctacagctaatttataattagatactgtttcaatgaaaccaaaatgagccctacaagttcctataaacaaaagcttccaatgt

SEQ ID NO: 1008 - DNA, 534 bp, Homo sapiens
  misc_feature 18, 491: n = A,T,C or G
acttggagggagcctcanccctgtgcttaagacttacagctgattggatcgggccttctgggattacccaggataatctcccctaaagttacctgatgagggtctttaatttcatctgcaaaatggttccacatcactacccaaattgtgtttgaataacttgaagatttgacacaagggaaaagcagccatggctgatgaagtgccacaggcctataaccccagctactgggaggccgaggcaggaggatggcttgagcccaggagttaaagtgtagcctgggcaacatagtgaggcctcatctcaaaaaaatgagaagggccatagtgtggctatgttagctgtttcaggggacactagcacgtgtgtggcaaaaataaacctttaatgtcagcagctacgtgtgtggctagtggctgctctgttggacagcagaactctagggggttagccaatgtgaaaaggacgaatgcccagccgatgccagcangagtgagggatgtgggaggacaaagactttcctgcttccaagt

SEQ ID NO: 1009 - DNA, 451 bp, Homo sapiens
actcaaggtttaaccttaaaattaagatttccttaaccttaaccttaaaattgatattatattaaacatacataatacaatgtaactccactgttctcctgaatattttttgctctaatctctctgccgaaagtcaaagtgatgggagaattggtatactggtatgactacgtcttaagtcagatttttatttatgagtctttgagactaaattcaatcaccaccaggtatcaaatcaacttttatgcagcaaatatatgattctagtgtctgacttttgttaaattcagtaatgcagtttttaaaaacctgtatctgacccactttgtaatttttgctccaatatccattctgtagacttttgaaaaaaaagtttttaatttgatgcccaatatattctgaccgttaaaaaattcttgttcatatgggagaagggggagtaatgacttgt

SEQ ID NO: 1010 - DNA, 394 bp, Homo sapiens
accattggtggccaattgatttgatggtaagggagggatcgttgacctcgtctgttatgtaaaggatgcgtagggatgggagggcgatgaggactaggatgatggcgggcaggatagttcagacggtttctatttcctgagcgtctgagatgttagtattagttagttttgttgtgagtgttaggaaaagggcatacaggactaggaagcagataaggaaaatgattatgagggcgtgatcatgaaaggtgataagctcttctatgataggggaagtagcgtcttgaccatgaggggaacaagaaactacttctaacgggaagaagaaacactacggtcgattaaaaaaattattttgttacttcgaagtatgtcctatatggggaaaaaacgt

SEQ ID NO: 1011 - DNA, 175 bp, Homo sapiens
acttcacttaaagagaaagagcacaataaagaaccagattcaagtgtgagcaaagaagtagatgacaaggatgcaccaaggactgaggaaaacaaaatacagcacaatgggaattgtcagctgaatgaagaaaacctctctaccaaaacagaagcagtataggaccgacaagtgt

SEQ ID NO: 1012 - DNA, 629 bp, Homo sapiens
  misc_feature 591: n = A,T,C or G
acttggctcctttgagctacccttattttaagaattataaataggtgtcaacccacacaaagaacagattgtggattaccgtagggaaaaaaatagcttactcaacttactaaaagtttcaacaccaaaaaagatttaacttggctgaaagttctgaaacagctgagacacagaaccaggaagctataatttataatgaaatgttgatacatacttaaaagctactgcagctgtagctatactaaaataagatttcttcagggtttacttaccctgaaatgcaagaatacaagcataacaataatattactgtttttatatgcaccaatacctctctttaatatataaagctctacaacaaatacctctaataattttacaattaaattaagtccatacttctatactactttggtctcaacatttttaaaacatcaattaattttgaaaatttacaatttaacaacatgatcctatcaataacaagcacattttgtagtggattaaagacacattcaaccatgcaatccagtgttcaataccttaatgataaataacaatgctgattgacttttattttgaaaaatcatngaaaactggaataatcatctgagactcacagtgatcac

SEQ ID NO: 1013 - DNA, 552 bp, Homo sapiens
  misc_feature 514, 525: n = A,T,C or G
actatgaacaccagaacagaagagattttttactattatgacacaaacacagggaaagagggcaaactagacattgtaatgcataagatgcaggaaaaagtgcagagcattaactataacccttttgaccagaaactttatgtctataacgatggttaccttctgaattatgatctttctgtcttgcagaagccccagtaagctgtttaggagttagggtgaaagagaaaatgtttgttgaaaaaatagtcttctccacttacttagatatctgcaggggtgtctaaaagtgtgttcattttgcagcaatgtttaggtgcatagttctaccacactagagatctaggacatttgtcttgatttggtgagttctcttgggaatcatctgcctcttcaggcgcattttgcaataaagtctgtctagggtgggattgtcagaggtctaggggcactgtgggcccagtgaagcctactgtgaggaggcttcactagaagccttaaattaggaattaangaacttaaaantcagtatggcgtctagggattctttgt

SEQ ID NO: 1014 - DNA, 162 bp, Homo sapiens
acttgaagaggcggaaggcagccagccagcaggtgcggctctgctcatcttcactgcagaagatccgaagccccttgtggccatttcgaagcttgttgggcttgacacagaaaccgaagtcagtgggcatcccgtagagcttgcggccctgcgtcaccacgt

SEQ ID NO: 1015 - DNA, 601 bp, Homo sapiens
  misc_feature 69, 173, 179, 186, 187, 534: n = A,T,C or G
acagacagggtttcaccgtgttagccaggatggtctccatctcctaacctcgtgatccgcccgcctcancctcccaaagtgctgggactacaggcgtgagccaccgcgtccagccagctttgactatttttatactcctcacaattctcaagcacttcttaggcagagcacanaaacanaaacaannaaaaaaacttagaaatatatgaatgcaagagatgggaagaggaaagaccatttcccaactagctcagagtagcctgatcgtaactccaaacagttcacaaaattctcttaggctgaaaccattcatctttcctaaacgtccctcatgtctgctaaaatcactttcccaaatgccttgtatctaggaatctgatgcctactgagcttaccttttatcaaattaatagtgactcaatctccattactggaaagcaggcactttaaccttgtagctctaaaacagaaatagtttttaactgatttcagttggaaaacccagcaattttaacaaaaagggggaggggcagnccaaatagcatttggaaaatgttaaaattttattattttacattctttaaccattatagttactgca

SEQ ID NO: 1016 - DNA, 273 bp, Homo sapiens
cccgagcgccgctccggctgcaccgcgctcgctccgagtttcaggctcgtgctaagctagcgccgtcgtcgtctcccttcagtcgccatcatgattatctaccgggacctcatcagccacgatgagatgttctccgacatctacaagatccgggagatcgcggacgggttgtgcctggaggtggaggggaagatggtcagtaggacagaaggtaacattgatgactcgctcattggtggaaatgcctccgctgaaggccccgagggcgaaggt

SEQ ID NO: 1017 - DNA, 305 bp, Homo sapiens
  misc_feature 76, 77, 83, 91, 92, 176, 219, 255: n = A,T,C or G
actggctcctcatctcactcgggcttatgccaaagatgtaaaatttggtgcagatgcccgagccttaatgcttcanngtgtanaccttttnnccgatgctgtggccgttacaatggggccaaagggaagaacagtgattattgagcagagttggggaagtcccaaagtaacaaaanatggtgtgactgttgcaaagtcaattgacttaaaagataaatncaaaaacatttggagctaaacttgttcaagatgttngccaataacacaaatgaagaagctggggatggcactaccactgctactgt

SEQ ID NO: 1018 - DNA, 156 bp, Homo sapiens
acaacggccagccaattaccaaaatggcctgtggggctgaattcagtatgataatggactgcaaaggaaacctctattcctttgggtgccctgaatatggtcagctgggacacaactcagatgggaagttcatcgcccgggcacagcggatagagt

SEQ ID NO: 1019 - DNA, 520 bp, Homo sapiens
actcatgcccgactgtctaccaggcacacagactttgaggagagggcgtatgtcgtcttgatccgcatcaatgatgggggtcggccacccttggaaggcattgtttctttaccagttacattctgcagttgtgtggaaggaagttgtttccggccagcaggtcaccagactgggatacccactgtgggcatggcagttggtatactgctgaccacccttctggtgattggtataattttagcagttgtgtttatccgcataaagaaggataaaggcaaagataatgttgaaagtgctcaagcatctgaagtcaaacctctgagaagctgaatttgaaaaggaatgtttgaatttatatagcaagtgctatttcagcaacaaccatctcatcctattacttttcatctaacgtgcattataattttttaaacagatattccctcttgtcctttaatatttgctaaatatttcttttttgaggtggagtcttgctctgtcgcccaggctggagtacctcggc

SEQ ID NO: 1020 - DNA, 195 bp, Homo sapiens
acgcccttttcctaacactcacaacaaaactaactaatactaacatctcagacgctcaggaaatagaaaccgtctgaactatcctgcccgccatcatcctagtcctcatcgccctcccatccctacgcatcctttacataacagacgaggtcaacgatccctcccttaccatcaaatcaattggccaccaatggt

SEQ ID NO: 1021 - DNA, 514 bp, Homo sapiens
  misc_feature 90, 415, 422, 443, 494: n = A,T,C or G
ttttttttttttttctgaaaaagtcatggaggccatggggttggcttgaaaccagctttggggggttcgattccttccttttttgtctanattttatgtatacgggttcttcgaatgtgtggtagggtggggggcatccatatagtcactccaggtttatggagggttcttctactattaggacttttcgcttcgaagcgaaggcttctcaaatcatgaaaattattaatattactgctgttagagaaatgaatgagcctacagatgataggatgtttcatgtggtgtatgcatcggggtagtccgagtaacgtcggggcattccggataggccgagaaagtgttgtgggaagaaagttagatttacgccgatgaatatgatagtgaaatggattttggcgtaggtttggtctanggtgtancctgagaataggggaaatcantgaatgaagcctcctatgatggcaaatacagctcctattgataggacatantggaagtgagctacaacgta

SEQ ID NO: 1022 - DNA, 556 bp, Homo sapiens
  misc_feature 19, 444, 522: n = A,T,C or G
acagtgggagaaatcacanatgccctgaaaaaggtatttggtgaacataaagcgaatgatcgaatggtgagtggagcatatcgccaggaatttggagaaagtaaagagataacatctgctatcaagagggttcataaattcatggaacgtgaaggtcgcagacctcgtcttcttgtagcaaaaatgggacaagatggccatgacagaggagcaaaagttattgctacaggatttgctgatcttggttttgatgtggacataggccctcttttccagactcctcgtgaagtggcccagcaggctgtggatgcggatgtgcatgctgtgggcgtaagcaccctcgctgctggtcataaaaccctagttcctgaactcatcaaagaacttaactcccttggacggccagatattcttgtcatgtgtggaggggtgataccacctcangattatgaatttctgtttgaagttggtgtttccaatgtatttggtcctgggactcgaattccaaaggctgccgttcangtgcttgatgatattgagaagtgtttggaaaaga

SEQ ID NO: 1023 - DNA, 376 bp, Homo sapiens
acatatatcccgatgtgtctgtgtgaatctttgtcttttttgggggagggcagagggcggttctttttttagatattgttcctaaaaaggaataaatgcatacacctgtttgtcaaaacacctttgctttttgtgcaactgctttatattaacgatactaaaaaaaatagctttggaaaaaaaactactgtatgtaacggaattgcagaatatgctgcacatgtattttatttagttatccttgctttaagaatattggatgacatttcctgacatgtgggagggagaaactccctaacttttttttttctgcttttaaactgtaacatagttgaagattttcttttttctgttctcattgattggagcattttgt

SEQ ID NO: 1024 - DNA, 185 bp, Homo sapiens
  misc_feature 11, 12, 109: n = A,T,C or G
acctgtgggtnnatcacctatgggtttatatcctcaaatacgacattctagtcaaagtcttggtaatataaccaatgttttcaaatgtattctgtcatacaaagagcanatttttattgaacttgtgcaataactatattaccatacaatataaatattcatgaatagtttcccaagttctggag

SEQ ID NO: 1025 - DNA, 173 bp, Homo sapiens
  misc_feature 15: n = A,T,C or G
ttttttttggctctngagggggtgctatagggtaaatacgggccctatttcaaagatttttaggggaattaattctaggacgatgggcatgaaactgtggtttgctccacagatttcagagcattgactgtagtatacccccggtcgtgtagcggtgaaagtggtttggttta

SEQ ID NO: 1026 - DNA, 494 bp, Homo sapiens
actgagcaggattaccatggcaacaacacatcatcagtagggtaaaactaacctgtctcacgacggtctaaccccagctcacgttccctattagtgggtgaacaatccaacgcttggtgaattctgcttcacaatgataggaagagccgacatcgaaggatcaaaaagcgacgtcgctatgaacgcttggccgccacaagccagttatccctgtggtaacttttctgacacctcctgcttaaaacccaaaaggtcagaaggatcgtgaggccccgctttcacggtctgtattcgtactgcggcgggtaggcctaggactgtgggggcaatgaatgaagcgaacagattttcgttcattttggttctcagggtttgttataattttttatttttatgggctttggtgagggaggtaagtggtagcttgtgtttaatatttttagttgggtgatgagaaatagtgtaaggagtatgggggtaattatggtgggcca

SEQ ID NO: 1027 - DNA, 251 bp, Homo sapiens
  misc_feature 163, 164: n = A,T,C or G
caagtttgaatttcagagaaacaatttcacgttaagaatgtttcatgcaatatttggcatatatttacagtaaaagcattcattatttgtctgaaattcaaatttaactgagcatgctggtttttctcattgtttggtttttctaaatctggcaatcctacanntgtggtcatgggaaatcacctacagcatgttaaagtcctctagttcatcatctcgtcacctgaaatggaagtcctttttccctcacc

SEQ ID NO: 1028 - DNA, 496 bp, Homo sapiens
  misc_feature 17, 18, 309, 444, 455, 456: n = A,T,C or G
accctcttcaagaatcnnatggatgtcgttttgaagggcggcaatcttcctcagtatagaggggtgaacattcggagattgctcaacggtagcatcgtggtcaagaacgatgtcatcctggaggcagactacactttagagtatgaggaactgtttgaaaacctggcagagattgtaaaggccaagattatgaatgaaactagaacaactcttcttgatcctgattcctgcagaaaggccatactgtgctatagtgaagaggacactttcgtggattcatcggtgactccgggctttgacttccaggancaatgcacccagaaggctgccgaaggatatacccagttctactatgtggatgtcttggatgggaagctggcctgtgtgaacaagtgcaccaaaggaacgaagtcgcaaatgaactgtaacctgggcacatgtcanctgcaacgcannggcccccgctgcctgtgcccaaatacgaacacacactggt

SEQ ID NO: 1029 - DNA, 192 bp, Homo sapiens
actttacaacagaaaggaaggcaggcaagtaggacaggttgctaagcagcaagtagcaagcctagaaaccaatgatcctattttaggatttcaggcaacaaatgagagattatttgttcttactaccaaaaacctctttttaataaaagtaaatacagagaattaattattctaacatattggcctctttgt

SEQ ID NO: 1030 - DNA, 221 bp, Homo sapiens
actgcttgttctctgtggaggagatgattaaaataaaaatcccagaaggacaggaggattctcaacactttgaatttttttaacttcatttttctacactgctattatcattatctcagaatgcttatttccaattaaaacgcctacagctgcctcctagaatatagactgtctgtattattattcacctataattagtcattatgatgctttaaagctgt

SEQ ID NO: 1031 - DNA, 306 bp, Homo sapiens
  misc_feature 187, 236, 274: n = A,T,C or G
acagtgcccattccacgagggtggctgactttcaccttatgaaatactgcttaatgaagtatgaacaacccgaatgcttccctgtttcccaggagcgatttgcattttgaaagagaagtgtgttaatccagctggaatttgcctggatagtggagtcttcccagctgggcggggggacggtcttcancaggacattttctttctttatgctgcagcctcatcatgggaacattcantaagaacttgctcacccttctaccaccaaatctaccancccacttgcacctttagccacatcctgttaca

SEQ ID NO: 1032 - DNA, 352 bp, Homo sapiens
  misc_feature 10, 15, 16, 35, 88, 145, 158, 291, 310, 311, 313: n = A,T,C or G
acacccccanggttnnaccgaacacgtaatgctgnaattggaaataaggacattaaattcaaacatttggaagaagcctttacatcanaacactggcttgttaggatatataaagtaaaagcacctgataacagggagacattanatcacaaacctcnagtcaccaacattttcccaaaacagaagtatttgtcaaagaagactaccaaaaggaagcgtggctacattaaaaataagctggtttttaagaaaggcaagaaaatatctaagaagactgtttaaatgcactgntctggttcctaacttgaannanttgtccttgtgagaaccggtctttgcctttagctcatgt

SEQ ID NO: 1033 - DNA, 385 bp, Homo sapiens
  misc_feature 293, 318, 335: n = A,T,C or G
gtgttgagagcttctcagactatccacctttgggtcgctttgctgttcgtgatatgagacagacagttgcggtgggtgtcatcaaagcagtggacaagaaggctgctggagctggcaaggtcaccaagtctgcccagaaagctcagaaggctaaatgaatattatccctaatacctgccaccccactcttaatcagtggtggaagaacggtctcagaactgtttgtttcaattggccatttaagtttagtagtaaaagactggttaatgataacaatgcatcgtaaaaccttnagaaggaaaggagaatgtttttgtngaccactttggtttttntttttttgcgtgtggcagtttttaagtttattagtttttttaaaatcagt

SEQ ID NO: 1034 - DNA, 401 bp, Homo sapiens
acctgttgctaggatctaataattttctcctgtgagtcactgcgcctggcccttttaataatttttaacagcaaaatttccttttggaattttagctggaagaattatttgatgcctggctgaaggtgatttcctgaagagggaatatatgtttgcctcttcctgaggtctgggggcactaacatttagggtcctttaaatttcgtttgagttttgtcagccaaaatcagaaaatattaattcaggctgcaaatttctgtgcagactgagatgtggttatttcttaacagcatttttcccttccctctacccagcactaatgctttggatgtatgagtttccttacagatccccaggaaactgactgagaaagtaaacacctttatttctagtttacctgt

SEQ ID NO: 1035 - DNA, 195 bp, Homo sapiens; identical to SEQ ID NO: 8

SEQ ID NO: 1036 - DNA, 287 bp, Homo sapiens
  misc_feature 12: n = A,T,C or G
acactgatctgncatcgcaccactgcactccggcctgggcgacaaagtgagactgtctaaaaaataataataataaaaagcattttgaaattagtcgcggtcaatgcaattctactctttggaatccgtttagctaaatgaatgtagtgctcttgttgaatggaaacaggtgataggaaatgcctaccatttgactcaatatggataatcaagagttgctcaggatgcttggatctgggggtagattctcatttcatcattgccctggcacatgtcaattactacat

SEQ ID NO: 1037 - DNA, 346 bp, Homo sapiens
  misc_feature 17, 54, 98, 99, 163, 233, 297, 324: n = A,T,C or G
acccagacaggatcatnaacacgtttagtgtggtgccttcgcccaaagtgtcanacacagtggtggagccctacaacgccaccctctcagtccaccanntcgtagaaaacacagacgagacctactgcattgataacgaagctctctacgacatttgcttcanaaccctaaagctgaccacgcccacctatggtgacctgaaccacctggtgtctgctaccatgagtggggtnaccacctgcctgcgcttcccaggccagcttcaatgctgacctgcggaagctggctgtgaacatngtcccgtttccccggctgcactttttnatgcccggctttgccccactga

SEQ ID NO: 1038 - DNA, 252 bp, Homo sapiens
actgccaggggacagtgttgcctctgttgagccttggctgctgtgggaagctgtaggttcctgactgaggcctgaggtggtggtgctgtcagggaacgctattgtgtgcgttgggcctggtcggctgtgggaggtggttgatttttcactgacgcctgagcttgtcgtgcgggcaggtgagagtgttctgtctggtgatctggggctactgtagaaggtggtagatttctcactcaggcctgctgttgtggt

SEQ ID NO: 1039 - DNA, 431 bp, Homo sapiens
actggatgggcttgtaaactacccaactatgatgctagggaaattgtgaacaatgtcagacgaatgctagatggcctggatcctcatcccatgcttccaaactacaaaaactttaaaggcacgattcaagaacttggtcaaaaccagtatgcagtcagtggtgaaatatttgtagtggacagaaacacagtagaaattacagagcttccagttagaacttggacacaggtatataaagaacaggttttagaacctatgctaaatggaacagataaaacaccagcattaatttctgattataaagaatatcatactgacacaactgtgaaatttgtggtgaaaatgactgaagagaaactagcacaagcagaagctgctggactgcataaagtttttaaacttcaaactactcttacttgtaattccatggt

SEQ ID NO: 1040 - DNA, 178 bp, Homo sapiens
  misc_feature 23, 84, 94, 95: n = A,T,C or G
gctgcgtggcaggagaggttcanattttcccctggacggtaattggcctttgagggggaaatggtggggacatctgggccatanaggacattcnnggtgactgggtcactgcggttgacactcgctgggttctgtatttcacattcataggatcctgcatcgttccctttgacgctga

SEQ ID NO: 1041 - DNA, 195 bp, Homo sapiens; identical to SEQ ID NO: 8

SEQ ID NO: 1042 - DNA, 150 bp, Homo sapiens
  misc_feature 15, 16: n = A,T,C or G
acatactggcctctnngattacatagatcagccattaaaataaaacaagccttaaaaaaaaaaaaaaaaaaaaaaaaaaaaaaaaaaaaaaaaaaaaaaaaaaaaaaaaaaaaaaaaaaaaaaaaaaaaaaaaaaaaaaaaaaaaaaaaa

SEQ ID NO: 1043 - DNA, 603 bp, Homo sapiens
  misc_feature 453, 464, 520: n = A,T,C or G
accaaaggatagctgttctgtttaagtagggacctctcatggcctacaggctttgacatctgagaatcaaactggagaacattccgaagccgttcttataagtgtctccatctctacctgggctgaaatggaatgtgcaaatgtagcccagcctggtccttgggtgttgccagttgattgatgactgggagccaaagtggcatctcctttgacctaaacgggcgatgatgaaataaaactcaacagcctttctctcatcttgcattgtgagatgcgaaatagagcgtgtctctctgcctctcattttaggctgaggccgtccaaagcggccatgccccatgtttccactagatggcgctgacacttcaggcatcaaccctcatggcctctcagccttgcaaaggcagccacttaaagtcggtgtcccgtgtggggcaccaagctgagctgcanacacccagtangcgcgaggcaaatgcgtcccattttaagaggcttgtatttatgagctctttgcttnctccctcccactatcttttaaagaattgctctccatctcctttggcaaagttcctttgccctttgtcttatttttgtgaaacc

SEQ ID NO: 1044 - DNA, 342 bp, Homo sapiens
accgcggccgttaaacatgtgtcactgggcaggcggtgcctctaatactggtgatgctagaggtgatgtttttggtaaacaggcggggtaagatttgccgagttccttttactttttttaacctttccttatgagcatgcctgtgttgggttgacagtgagggtaataatgacttgttggttgattgtagatattgggctgttaattgtcagttcagtgttttaatctgacgcaggcttatgcggaggagaatgttttcatgttacttatactaacattagttcttctatagggtgatagattggtccaattgggtgtgaggagttcagttatatgtttggg

SEQ ID NO: 1045 - DNA, 177 bp, Homo sapiens
  misc_feature 97, 121, 122, 161, 162: n = A,T,C or G
accattggtggccaattgatttgatggtaggggagggatcgttgacctcgtctgttatgtaaaggatgcgtagggatgggagggcgatgaggactangatgatggcgggcaggatagttcnnacggtttctatttcctgagcgtctgagatgttagtattnnttagcttttgttgtg

SEQ ID NO: 1046 - DNA, 186 bp, Homo sapiens
  misc_feature 17, 20, 127: n = A,T,C or G
actggatggacctctcncanacagcatggaggcagtggcgttcaacaagcactatcagatcaatgacatctacagttgcagctggggaccagatgacgatgggaagacagtggatggcccccatcancttggaaaggctgccttacaacatggggtgattgctggtcgccagggctttgggagcat

SEQ ID NO: 1047 - DNA, 134 bp, Homo sapiens
  misc_feature 14, 68: n = A,T,C or G
acacactgaagtgnctctgtgtcacacaggtatttcttggtcctctggagagcagaggactcactcanctctttgcttcatgcctcgctttaatggtagtaaacacttaaccagtggaatagtctgactgctgg

SEQ ID NO: 1048 - DNA, 448 bp, Homo sapiens
  misc_feature 17: n = A,T,C or G
acattggaagcttttgnttataggaacttgtagggctcattttggtttcattgaaacagtatctaattataaattagctgtagatatcaggtgcttctgatgaagtgaaaatgtatatctgactagtgggaaacttcatgggtttcctcatctgtcatgtcgatgattatatatggatacatttacaaaaataaaaagcgggaattttcccttcgcttgaatattatccctgtatattgcatgaatgagagatttcccatatttccatcagagtaataaatatacttgctttaattcttaagcataagtaaacatgatataaaaatatatgctgaattacttgtgaagaattgtatttaaagctattttaaatgtgtttttatttgtaagacattacttattaagaaattggtttattatgcttacttgtttctaatctggtggtaaa

SEQ ID NO: 1049 - DNA, 338 bp, Homo sapiens
acttaaaaagttttttaaaaaataattaaatgcactactcatctcaatgaaatttttcgttttcctattttctagaactttctaaaaaaggaaacaaagcaaaaacaacaacaaaaaaacctgtttgacttaaggacacttgctgatcttgacacttgataatactttaagaaatggaaaggttttcctaaatctaatacctgcttaatataatccactttggaagattcatctgaaagaaacatagggtttgatttttaatactaatataaaataatctgccttccaatcaaaacaaaaatgttttcaactgtatacgctcctcggttgtgttttgt

SEQ ID NO: 1050 - DNA, 392 bp, Homo sapiens
acatatttaacactcagcttctataattagaaacaaatggcccatctggtttcatctaggcctctttgctatcctttcatctccaactggattattttaaagcaaattctagatgacattctgctgagcatttctgccagaattacacctctctttgctaatgtgaaaaaatgcccatgataactgtaaaatacgtgtgtcctatttaggtgtctaaacactttaatgtcacagtattaaggccttaaaatatagcttagatatatttttctaaattaaaagacttcattttttagatatacagaaaattgagcagaaaacagtgagttcccatataccttcttcatcccaacaagtttttccccctcattaacatattgtgttagtgtggt

SEQ ID NO: 1051 - DNA, 369 bp, Homo sapiens
actgattgagggtggcgttcgcctgctcgtagtttttactgacttccctcgtgtgaagtccgatgcttgcgttgcgcagggccagggtgtcatagatgcatgagctatctccgtcacagttggagatcaaatgttcagcccaggagctgtttttttgcagttgtgagtagaaaacaggggtgaagttggaaggcagctggtcattcctcttgccaaggaggcctgtcccgttgatctgccaggtcattccaaagtggaaaagcatctcctcagggctccctgggggaatggtggagccattgggcatcctgaagtcgtcctctggattgttattccagacccccaggagcccctccgtgcggttctggt

SEQ ID NO: 1052 - DNA, 184 bp, Homo sapiens
  misc_feature 15, 171, 179: n = A,T,C or G
acctgtgggttcatnacctatgggtttatatcctcaaatacgacattctagtcaaagtcttggtaatataaccaatgttttcaaatgtattctgtcatacaaagagcagatttttattgaacttgtgcaataactatattaccatacaatataaatattcatgaatagttncccaagtntggta

SEQ ID NO: 1053 - DNA, 356 bp, Homo sapiens
acatgaaactccagcagatttaatattggcatccatcatctagtcagacctctcacatgttcttcaaatcaatcaaatttgggattctcaacattttctgtgtcaataaaaggtgtggaattagtagattcgatgaagacctgtttttccttgccacattggacttccagacgccatttggattgggtttagaagatggggaaatttagaagacgtttcttggcctgagtctcttaagagtagagatgcagaagagagagtgagaccacgaagagactggctgttgactgcagggcaccaccagccaccttggtggtggcattagttggatttggggccaacccagagttggaagt

SEQ ID NO: 1054 - DNA, 518 bp, Homo sapiens
acggtttaatgttaatgcaaatgacagtatcctgcatagcatcatagtttcacccattctattttaggtgaggggatatggaggagatggggcagtgatctacaaatgggaagagacatctaagggacagtcctattgccaaggaaaaaccatttggggaagcctactgccccaaagaacaattctggtctaggctgcagcactgtcaccttaggcagctgcaagctctctccccttcaggcccttgtttgtaaaggcaaggcagagaaccatactcaacgtgtgagagagcactccgcaaatgccacggctgcgcatgggcgtttaagatcaccacggggctcccaaatcatggaccaagcaagttcaggagatgcggtgcagatggctgcacatggtaggaaatgcttcctgggctgctgtcctaaaggcagaattcagcctggcccttctctgggccccagttaccctctcagtggctcacaggtcagtatccgtaacaaacatgttttttcttc

SEQ ID NO: 1055 - DNA, 195 bp, Homo sapiens; identical to SEQ ID NO: 8

SEQ ID NO: 1056 - DNA, 363 bp, Homo sapiens
  misc_feature 248, 259, 279, 312, 351: n = A,T,C or G
ccgccttttacttccgcccgcttcttctggtcactccgccaccgtagaatcgcctaccatttggtgcaagcaaaaagcaatcagcaattggacaggaaaagaatggcattgaagcagatttccagcaacaagtgctttgggggattgcagaaagtttttgaacatgacagtgttgaactaaactgcaaaatgaaatttgctgtctacttaccaccaaaggcagaaacaggaaagtgccctgcactgtnttggctctcangtttaacttgcaacagaagncaaaaattttatattcaaaatctggttatcatncagtctgcttcagaacatgggtctttgttgtcattgctnccagataccagc

SEQ ID NO: 1057 - DNA, 73 bp, Homo sapiens
  misc_feature 10, 11, 14, 50: n = A,T,C or G
actgcggcgnntangcctaagattgtgggggcaatgaatgaagcgaacanattttcgttcattttggttctca

SEQ ID NO: 1058 - DNA, 504 bp, Homo sapiens
  misc_feature 491: n = A,T,C or G
acgatggggataatatactggcaagctactttgcagagttggtttaaggataagaatgtatgagaagtatactgagttcctaagaaggaaaacctcaaaacacggtggctatcattaaaatgttttaagttcttcataaaaataacatattattcctcaaattacagaggtctctaatagtgatggggaaaaattgttctttgcaaaatagaaatatttttccactatttctgaacctaacaactttgaaagcattcagcagtttctctaagattatttaaagcaaagcgctcatgatgtattttacaattagatactcttagatacgtgttctctgtgctgagtcttaagcaattgccagattcaccaattagttttttaaaagtagaaaacattttaatcaactcaactgaaaagcgttttagggggaaatcaataattttggtaagtgggttaacagtaaacattagcggctgacttttgcacagcanatagattctagtg

SEQ ID NO: 1059 - DNA, 275 bp, Homo sapiens
acgacgagtcgggcccctccatcgtccaccgcaaatgcttctaaacggactcagcagatgcgtagcatttgctgcataggttaattgagaatagaaatttgcccctggcaaatgcacacacctcatgctagcctcacgaaactggaataagccttcgaaaagaaattgtccttgaagcttgtatctgatatcagcactggattgtagaacttgttgctgattttgaccttgtattgaagttaactgttccccttggtatttgtttaataccctgt

SEQ ID NO: 1060 - DNA, 350 bp, Homo sapiens
acaggggtggcaaaatatgcctgacggatcatttcaaacctttgtgggccaggaatgtgcccaaatttggactagctcatctcatggctctggggctgggtccatggctggcagtggaaatccctgacctgattcagaagggcgtcatccaacacaaagagaaatgcaaccaatgaagaatcaagccactgaggcagggcagagggacctttgataggctacgatactattttcctgtgcatcacacttaactcatctaactgcttccccggacaccctccacctctagttgttactaagtagctgcagtaggcattgctggggaagaaacaaacacacaccaaacagta

SEQ ID NO: 1061 - DNA, 154 bp, Homo sapiens
actggacaaagaaaactgatatttactataaagaaaatcccagccttctgtgctctgggcccccacagcaaacactgccaaggtcacgtcgacaggcaggctcaagtttccattggattccttccactttctgaaatagccttctgccctctgt

SEQ ID NO: 1062 - DNA, 385 bp, Homo sapiens
acactttatcccttcacctataacagcttgtattttcgtgtgcagttttatgattactcaaattgcacttgtagatatatcttaacaaacacttcatacaaaataagcataggattattttattcaccaaagtattgttaattagcagagctcaattctttggtgtcagtttatcaaatttaccttctaggttttgagtttattattaagaacctgcgtagacttattttattttttaatacataggatcttttgccagaaatgagggcatactggcctggcgtaattcactcgtttcccaatcgcagccgcttctggaagcatgagtgggaaaagcatgggacctgcgccgcccaggtggatgcgctcaactcccagaagaagt

SEQ ID NO: 1063 - DNA, 195 bp, Homo sapiens
acgcccttttcctaacactcacaacaaaactaactaatactaacatctcaggcgctcaggaaatagaaaccgtctgaactatcctgcccgccatcatcctagtcctcatcgccctcccatccctacgcatcctttacataacagacgaggtcaacgatccctcccttaccatcaaatcaattggccaccaatggt

SEQ ID NO: 1064 - DNA, 172 bp, Homo sapiens
acagaactaaattttttaaactttatttgctgttaaattctgtgaagtttcagttatctaaaataaatatacacaaatatgaaatataatgtttcagattgcaaggtaatatgtaatagtagtgtttgtaagatactcttgtctaatattaactagtagtattttgatttgt

SEQ ID NO: 1065 - DNA, 173 bp, Homo sapiens
actgggcacacctccagccctccctcttccactgaaggccattgcctattcctagaaagttctttcccaggtatgcagctttcagtttccacttcagaggccacagtgtctggggaacggactgcccccaatactaaagggagtcaaatctctttaattccgcactcctcagt

SEQ ID NO: 1066 - DNA, 343 bp, Homo sapiens
acacataaacctatttataaaacacatctctatgctttttttttttgcttctaaatataaattttgctatttagccatcagctaaatataaattttgctatttagccatcagctaaatgatctaaatgcaaaccccaaagtttccagttaaaagtataaaatctgcttctaaccacagcagcatactgcttcaagtattctcctcctatgtaaggtcgagataattttgtcacatatgaattttaggtggacatctcatttcctcacatattagacatcctgctggggtcacagcttctttgttccatttgtctttttttgttgttttttaataagacattgc

SEQ ID NO: 1067 - DNA, 147 bp, Homo sapiens
acacatttaactccccaggttaaacaccctgtaatttaccttgaagctctttacattctgaagttatataaaattaagcaggaaaacattaacattaaatgaaaatcaattttgcacaaataagtgtgatcaagtagcttaaatcac

SEQ ID NO: 1068 - DNA, 218 bp, Homo sapiens
  misc_feature 11, 12, 14: n = A,T,C or G
acaaactttannancaatgttagtatgtcataaaatataacattacagcttatttaaaaccaaatatagttgaacatatttaaaatacattttcacagaatggatgaattagttgtttcttcagagttacttatgaacagttgaatgctttaaaatgttctgtctgtaggtaacatctaaaacacaagtgggtttattttaaatttttaaaatttgaa

SEQ ID NO: 1069 - DNA, 490 bp, Homo sapiens
  misc_feature 14, 443, 468: n = A,T,C or G
acaggattccttanagggtgaggccagagtgttcctggaccccaacatactgtctgacgatggcacagtggcactccgaggttacgcgttcagcgaagatggtgaatattttgcctatggtctgagtgccagtggctcagactgggtgacaatcaagttcatgaaagttgatggtgccaaagagcttccagatgtgcttgaaagagtcaagttcagctgtatggcctggacccatgatgggaagggaatgttctacaactcataccctcaacaggatggaaaaagtgatggcacagagacatctaccaatctccaccaaaagctctactaccatgtcttgggaaccgatcagtcagaagatattttgtgtgctgagtttcctgatgaacctaaatggatgggtggagctgagttatctgatgatggccgctatgtcttgttancaataagggaaggatgtgatccaantaaaccgactctggtacctgcc

SEQ ID NO: 1070 - DNA, 200 bp, Homo sapiens
gtcttggtgaggtgccgccatttcatctgtcctcattctctgcgcctttcgcagagcttccagcagcggtatgttgggccagagcatccggaggttcacaacctctgtggtccgtaggagccactatgaggagggccctgggaagaatttgccattttcagtggaaaacaagtggtcgttactagctaagatgtgtttgt

SEQ ID NO: 1071 - DNA, 84 bp, Homo sapiens
acttattgtcgcaatttttttttttttttgatacagggtctcgctgtgttgccccaggctggagtgcagtggcactgatcacgt

SEQ ID NO: 1072 - DNA, 214 bp, Homo sapiens
actagaatcaattaattctttttccatccctatctgtggagtggtttccaagtatttcttttggaaaaatacgtgatagtcaagatgggggacaagtagagaaagaaaaataaaaaatagaactcctaaaggattctgtaatctttgaggtgccagcctttttaagaatggattttagcaaggcacttgataaaatctctcatgaagtcctcgt

SEQ ID NO: 1073 - DNA, 317 bp, Homo sapiens
gcatttacaactgctacaaaaatgccagcactccatcgacatgaagaagagaaattcttcttaaatgccaaaggccagaaagaaactttacccagcatatgggactcacctaccaaacaactttctgtcgttgtgccttcatacaatgaagaaaaacggttgcctgtgatgatggatgaagctctgagctatctagagaagagacagaaacgagatcctgcgttcacttatgaagtgatagtagttgatgatggcagtaaagatcagacctcaaaggtagcttttaaatattgccagaaatatggaagtgacaaagt

SEQ ID NO: 1074 - DNA, 68 bp, Homo sapiens
  misc_feature 10, 15, 16: n = A,T,C or G
ggcgggtacncctannactgtgggggcaatgaatgaagcgaacagattttcgttcattttggttctca

SEQ ID NO: 1075 - DNA, 369 bp, Homo sapiens
  misc_feature 355: n = A,T,C or G
actttattttaaatacattaatttttaaatgctgctcatctttttctcatctggtggcaaaatactagtgcaactttcatcaaaataaagtttaccacagatgtaaataaattttcccaattgaaaatggcccttcagtggccattaaataaaatttctcaacctaacttaagtgaaaaagaactggtggttgtcattataagcaaaaatataaagtattatagcatcatctacattgctccttacaacacaaactttgaaagaaccagagatgctttataggagttcagttggttttgagaaggcacatgggtgtggatttttttttttttttttaacattctagaaattttgncaccaccactcttt

SEQ ID NO: 1076 - DNA, 220 bp, Homo sapiens
actcaaaatataagcagcttgaaactggctttaccaatcttgaaatttgaccacaagtgtcttatatatgcagatctaatgtaaaatccagaacttggactccatcgttaaaattatttatgtgtaacattcaaatgtgtgcattaaatatgcttccacagtaaaatctgaaaaactgatttgtgattgaaagctgcctttctatttacttgagtcttgt

SEQ ID NO: 1077 - DNA, 291 bp, Homo sapiens
  misc_feature 246: n = A,T,C or G
gaagagtggaaatggggaactcccccagaggtggatactggggggcaggcctcccaagctgatggacatgagagtagggccctgacaggccttcctcctctcaaacctggcagatgggggcctctctggaagagggaggggccctgtcactgtccagagtctctttttacacttcacctccttctgcagtcagactgaaatataaaaaaggtggtggtggtggtgaaggggctggtggagatgtangaaccgatctgctatttttaatttcctgtgaggatagagacttgc

SEQ ID NO: 1078 - DNA, 418 bp, Homo sapiens; identical to SEQ ID NO: 310

SEQ ID NO: 1079 - DNA, 166 bp, Homo sapiens
atcatacatactttacaagcaagttaaatggagataaagttgaaatcatagaagatgcaaatgacctttcaaaatcaacacaatgtgttctgaaactttcgtgactaataccatgcatctgtgatcaatgaactatgtggttttgaatcggatgtagaccattagt

SEQ ID NO: 1080 - DNA, 345 bp, Homo sapiens
  misc_feature 13, 14: n = A,T,C or G
ttttttttttttnngtcttcaaatggcttttttaaagtgaaaattaacttagcatattaagacaaagacaatagaaataatatacataattttattacaaaattttttttaaaaaaacgaaatgcaacatcctaaaaaacccaaaatttactattgatactaattcctacaagtttgctgtgctaccatacacaagaaattaaaaaaaccattaaatatttaggaacattcaacatcagaagctgtaaaatctaactgtatgagtagcccatcaaaaagctacaacctgcattttttaaaagtattttctctacagagaatcttatcagctatacaaaaatctgt

SEQ ID NO: 1081 - DNA, 297 bp, Homo sapiens; identical to SEQ ID NO: 459

SEQ ID NO: 1082 - DNA, 512 bp, Homo sapiens
accaactaggagacacaataatcctattagtttgttctcccaaacccactccagtttatcaggtaatatgctctgtaaggttctttccaaccccattagcacatacatagattacctataatttcacctaatgtaatctaccttcctactgaggattgaggttttaacgtttgtttttttccccccactttcttgatcagtgattctcaaccatgtaggaattaatgaaaccaattctgtatcaccactgcaaccaagacagcaataccaagtgatatgtatttttcaaactaatgtcattttgttctctatactgtaaaaaacgagaagatgcagtcctcaacttagaactcaatactaggaagggtcaagttgtcaaaaaatgtctttcaacagtagaaaagtttgctttcaaattaaaaaacaaagcacgtattgcaaacatcgtgtaatgataaaattacagaaaaaaatatattcagaatgacccatggcattcacgccataccaga

SEQ ID NO: 1083 - DNA, 514 bp, Homo sapiens
acgaggtggctcgactgctcaacctcaccgagaggcaggtcaagatctggttccagaaccgcaggatgaaaatgaagaaaatcaacaaagaccgagcaaaagacgagtgatgccatttgggcttatttagaaaaaagggtaagctagagagaaaaagaaagaactgtccgtcccccttccgccttctcccttttctcacccccaccctagcctccaccatccccgcacaaagcggctctaaacctcaggccacatcttttccaaggcaaaccctgttcaggctggctcgtaggcctgccgctttgatggaggaggtattgtaagctttccattttctataagaaaaaggaaaagttgaggggggggcattagtgctgatagctgtgtgtgttagcttgtatatatatttttaaaaatctacctgttcctgacttaaaacaaaaggaaagaaactacctttttataatgcacaactgttgatggtaggctgtatagtttttagtctgtgtagtta

SEQ ID NO: 1084 - DNA, 480 bp, Homo sapiens
acaaagcagcaactgcaatactcaaggttaaaacattagaaaagcatttgtgtgacaggtatattacagtattatcaaaatattacattttcagacttacttagcagataatcatccaccagagcttaaatctttaaattatttccatagtcttaaaaaatatgtaatgtcagaatgcatataaaaagaatgtaaaaggaaacctaaaatacaaatggaataatgtaacaaataaatatttgatttcagtaactgttaataatcagctcaacaccaccattctctctaaactcaatttaattcttataggaataatgaactgtcaaatgccatggcataattatttatttccaagctatcatcaatgattagaactaaaaaaattttggcataaaaaaatcacaattcagcataaataaagctatttttagcttcaacactagctagcatctctaagaattgttgaaataagtacctcgg

SEQ ID NO: 1085 - DNA, 478 bp, Homo sapiens
gttctggggcttgtcctcctttctgttacggtccagggcaaggtctttgaaaggtgtgagttggccagaactctgaaaagattgggaatggatggctacaggggaatcagcctagcaaactggatgtgtttggccaaatgggagagtggttacaacacacgagctacaaactacaatgctggagacagaagcactgattatgggatatttcagatcaatagccgctactggtgtaatgatggcaaaaccccaggagcagttaatgcctgtcatttatcctgcagtgctttgctgcaagataacatcgctgatgctgtagcttgtgcaaagagggttgtccgtgatccacaaggcattagagcatgggtggcatggagaaatcgttgtcaaaacagagatgtccgtcagtatgttcaaggttgtggagtgtaactccagaattttccttcttcagctcattttgtctctctcacattaa

SEQ ID NO: 1086 - DNA, 257 bp, Homo sapiens
  misc_feature 15: n = A,T,C or G
actatagggtaaatncgggccctatttcaaagatttttaggggaattaattctaggacgatgggcatgaaactgtggtttgctccacagatttcagagcattgaccgtagtatacccccggtcgtgtagcggtgaaagtggtttggtttagacgtccgggaattgcatctgtttttaagcctaatgtggggacagctcatgagtgcaagacgtcttgtgatgtaattattatacgaatgggggcttcaatcgggagt

SEQ ID NO: 1087 - DNA, 265 bp, Homo sapiens
cacaccctgagcaagaaggagctgaaggagctgatccagaaggagctcaccattggctcgaagctgcaggatgctgaaattgcaaggctgatggaagacttggaccggaacaaggaccaggaggtgaacttccaggagtatgtcaccttcctgggggccttggctttgatctacaatgaagccctcaagggctgaaaataaatagggaagatggagacaccctctgggggtcctctctgagtcaaatccagtggtgggtaattgt

SEQ ID NO: 1088 - DNA, 375 bp, Homo sapiens
acaaaagcctcatgaaggtcctggagaaatggggaaaccagtcgtcattcctaaagaggatcaagaaaagatgaaagagatgtttaaaatcaatcagttcaatttaatggcaagtgagatgattgcactcaacagatctttaccagatgttaggttagaagggtgtaaaacaaaggtgtatccagataatcttcctacaacaagtgtggtgattgttttccacaatgaggcttggagcacacttctgcgaactgtccatagtgtcattaatcgctcaccaagacacatgatagaagaaattgttctagtagatgatgccagtgaaagagactttttgaaaaggcctttagagagttatgtgaaaaaactaaaagt

SEQ ID NO: 1089 - DNA, 364 bp, Homo sapiens
cccttagagtcttggttgccaaacagatttgcagatcaaggagaacccaggagtttcaaagaagcgctagtaaggtctctgagatccttgcactagctacatcctcagggtaggaggaagatggcttccagaagcatgcggctgctcctattgctgagctgcctggccaaaacaggagtcctgggtgatatcatcatgagacccagctgtgctcctggatggttttaccacaagtccaattgctatggttacttcaggaagctgaggaactggtctgatgccgagctcgagtgtcagtcttacggaaacggagcccacctggcatctatcctgagtttaaaggaagccagcaccatagcagagt

SEQ ID NO: 1090 - DNA, 346 bp, Homo sapiens
actagaactaccttaagtatgctgtgctttcttttcaagtgaggtatctatattgaggaaaaaaatcttataaattccttttacattaaactaatttaatacactattttgttttctgggctgaatttttaaatttttttcttacatttgatcactttctaattcaaaaattgtagcactacataggacatttaattctattactaaataggctccaaattacattatacagtttagaaaccatttcaatgaatggatttacaaaaaaaaaaaaaactgtccttttaaatgaaatgcaatataaaatactaatacacttttcttccaaaagtggaaatgcttaagt

SEQ ID NO: 1091 - DNA, 423 bp, Homo sapiens
  misc_feature 15, 16, 419: n = A,T,C or G
gcggtgtatagcacnnatggttaattctcaagctgctaacattcgatctggatggaagaacattttctctgtatttcatctagctgcatctgatcaagatgaaagcatagtggaacttgcattccaaacaaccgggcacattgtcacccttgtatttgaaaaacactttccagcgaccattgattctttccaggatgcagtgaagtgtttgtctgaatttgcgtgcaatgcagctttcccagacacaagtatggaagcaattcgacttattcgccattgtgcaaaatatgtgtctgatagacctcaggctttcaaggaatacacaagcgatgatatgaacgtagcacctgaagacagggtgtgggtgagaggatggttcccaattctctttgagttatcctgtatcatcaatagatgcnaatt

SEQ ID NO: 1092 - DNA, 405 bp, Homo sapiens
acatatatgtatatttccttttttaatacaggataataatatggggtcttgtccttcacctcttaagttcagggaacagtttgtcctgaccacacatatgttatcagtgtaatgctttatgaagctttagaaatgagctcatgactcattaaaaaataataaacgatgctattttaatattttcaaataaataatctgaggatgtgtttcatactttagcatcaacgctgagttgtgccttgtagaattgcattgtctatacatgcaaaagactattaagttaggatgaactagattccctaattacagtgaaattctatcttgcaaatgctatagaataacttgcattttaaagtgtatttgcacattttacatatgctatgtggttgcctttgggttttctgt

SEQ ID NO: 1093 - DNA, 330 bp, Homo sapiens
actgattttaaaaactaataacttaaaactgccacacgcaaaaaagaaaaccaaagtggtccacaaaacattctcctttccttctgaaggttttacgatgcattgttatcattaaccagtcttttactactaaacttaaatggccaattgaaacaaacagttctgagaccgttcttccaccactgattaagagtggggtggcaggtattagggataatattcatttagccttctgagctttctgggcagacttggtgaccttgccagctccagcagccttcttgtccactgctttgatgacacccaccgcaactgtctgtctcatatcac

SEQ ID NO: 1094 - DNA, 323 bp, Homo sapiens
cggcgacacctcgcagtcattcctgcggcttgcgcgcccttgtagacagccggggccttcgtgagaccggtgcaggcctggggtagtctcctgtctggacagagaagagaaaaatgcaggacactggctcagtagtgcccttgcattggtttggctttggctacgcagcactggttgcttctggtgggatcattggctatgtaaaagcaggcagcgtgccgtccctggctgcagggctgctctttggcagtctagccggcctgggtgcttaccagctgtctcaggatccaaggaacgtttgggttttcctagctacatctggt

SEQ ID NO: 1095 - DNA, 321 bp, Homo sapiens
acaagttctgtgcataagatccaaggaattgcttactaatctgtaggcaaccctctttctaatcagaatcctttattcctcggctgcagatgagatagggcacaatctgttgtaaacagggcactgttgttaaaccaggataatattcttaaattaagatcgttcttgttctattaaaaagactttcccaagtgtcttccatcactgagtatattctgctgacctcttaatttcataaattaactttcttttgattccatttttatggtggtgtccgcagttttgttttaaaaattggtttaaatttatataaaactctgt

SEQ ID NO: 1096 - DNA, 299 bp, Homo sapiens
  misc_feature 12: n = A,T,C or G
acagaaacatanagccttgtcttgactataaggtttagttggtgttttaataacaacaaaaaagcacaataagacacaaacactcttcaacaggtttactcaaacagcttcgctcaagaagaaaaaggcacagatttaaagggatgacaataatcattaagaatgaagtaaatggagactcagtcaaaaaatgatacttcatgaattaagtcaagaaaaacaaaagtctttcaaattatctgtcttccttaaaatgaatttttaaattaaattgtataaacatatgatataaagttggt

SEQ ID NO: 1097 - DNA, 225 bp, Homo sapiens
  misc_feature 120: n = A,T,C or G
accaattttttttttactgtgcttcaaataaatagaaaaatagttataatattgatcttcaactttgccattcatgcttctatgcatattaggctacgtattccacattgaaagcatganagtgtctaggcctttgaatggcatatgccatttctgggaaatgcatctggaggctaagtattgctttctacaaataattgccccctttgttttaaaaagaagaaa

SEQ ID NO: 1098 - DNA, 123 bp, Homo sapiens
  misc_feature 29: n = A,T,C or G
acctgtcaactgccctggcctgcccccangacccctatacctcccagcacagcaggcagcctccaggatcctatttagacctatggctcagcatctgttctgattcattgttgtcccctctgt

SEQ ID NO: 1099 - DNA, 190 bp, Homo sapiens
acttcaaagccagtttcctataagcctttttcaattcttcctgagtagcattgggtttgacccccaaaacatcgtagtaagttgtttctttcaccatcttctactgccggtgcgggctgaggccggtgtgtgagggagcgggaaggagcgccgagctgtgcgcagccggggtagttaccgctcctccgcc

SEQ ID NO: 1100 - DNA, 255 bp, Homo sapiens
acgtagtctaggccatatgtgttggagattgagactagtagggctaggcccaccgctgcttcgcaggcggcaaagactagtatggcaataggcacaatattggctaagagggagtgggtgttgagggttatgagagtagctataatgaacagcgatagtattattccttctaggcatagtagggaggatatgaggtgtgagcgatatactagtattcctagaagtgagatggtaaatgctagtataatatttatg

SEQ ID NO: 1101 - DNA, 385 bp, Homo sapiens
actctcagtggggaccacctgctttcatcccctgacattgtgggagaaattttgcaatgtatgctaatcaaaatgtatttatatgttctctgctgatgttttatagaggtttgtgaagaaaattcaacctcagcaacttcagaaactgcccctgatacgtgtgagagagaaataaaatcagattttgagtgttgaagggactgaggaagtgaggataaagagcatgaggacagcatggaaagaaggaggcagaagtggaactgaactttcactctccatgggacagatcaatctcattatcaagtctgaatagcaaccagccctctcctccaccccgtttctcctcagttaattggagctcagtcaggtgattattgagtcttgt

SEQ ID NO: 1102 - DNA, 237 bp, Homo sapiens
  misc_feature 119, 208: n = A,T,C or G
gaacaaggccctcctttctccaggcctgggctacgggggagggagagcctgaggctctgctcagggcccatttcatctctggcagtgccttggcggtggtattcaaggcagttttgtancacctgtaattggggagagggagtgtgcccctcggggcaggagggaagggcatctggggaagggcaggagggaagagctgtccatgcanccacgcccatggccaggttggcctcttct

SEQ ID NO: 1103 - DNA, 318 bp, Homo sapiens
acacctggcccctgaggacggacacctgcactttcccttccactcgctcctgggacttggcgatgtagtggcggacaaattcacactcagggctgtgccagaaaccggtatacaccagctcagcaaatttcaagcccaggccttgtttgattttgtgcacttcccggtccatggtgaaggcctcgatgtctaaatgagcatggtaaaggatggtgcctgctggggtctcgtagatacctcgggacttcattccaatgaagcggttctccacgatgtcaatacggcccacgccatgcttgcccgcgacttcgttcaggt

SEQ ID NO: 1104 - DNA, 422 bp, Homo sapiens
actatctggctgcagagactttcttaggtcccgtgttagaccccatggggtctcagcatgtggtcatgtggtaatgcattcctttcaaaggctttgggctgaactcaagttggaaatacctggaaaagaccaagcttctcctttgggtgtctgcggatcctattaaaaatattcgtgatgttttaagttctccaatacaattttctccacgaaaacaagcatcagatacactacctctaagtatttattggaggggttccaacagcctcgtggacaggccttctcagcagctactgagtgccccctaggggtggggaggggccagtgcacatggaggcaaaccacagagcccttttgtggcctattattatgaagaactaaaatgtggccagtgaaccagtcagtgctcatcactacggggc

SEQ ID NO: 1105 - DNA, 487 bp, Homo sapiens
acacaagtgatcaatttgtcacaacatgacaagttattgataacaagtattttaacttacaggtatgataaaagtctaacatttacaaaatggggatattactatataaaaaattgaaagtattagtttttgtgtaaaatattagtttcttcattctgatacagtgctaaacttaatgtaaagccaaacttcaggacctactctagacataaaataattttcatttccatgtctctagaatctaaaatgctaagtaaattttctctattacctttcgtcaaaataacttaaagtattaaaagacaacctaatgacagtaataacatttttctttcctaaaaaatatttggtatctgatttaaagacatgaataacacaatagtaacaacttaaagatcgacaagatatactaaaaatgatatttgggcatcatatctacataataattgtgaaacaactgttttcctaataactgagaagcaatcag

SEQ ID NO: 1106 - DNA, 172 bp, Homo sapiens
acaaagatttttttacacaaagaaacttaatgctgtattaataaattcagtgtgtagcttcaattgggatagttccaaaagtgaagattttgtgaggaataagtgcaaattttttttttattttaaaaaattctttgaaactcttaagtctttgtgtctgcaatgaaattgt

SEQ ID NO: 1107 - DNA, 281 bp, Homo sapiens
  misc_feature 109, 155, 204, 220, 251, 256, 267: n = A,T,C or G
acatatgtgtgagtgtgtgtatgtgtgtgtatgtgtgtgcgtgagtatgtgtgagtgtgtgtgtatgtgtgagtgtgtgtatgtatgtgtgagtgtgtgtgtggtgcancggatgacatactccgtctctgactcggtgagggccacgggctcangcgaggacttgaagaggggcccaagaccgcggaactctggcactgctgncaactgctcctggaanatctcctgcctggtagctgccactttctcangctgnttgactgctgngatgggggtacctc

SEQ ID NO: 1108 - DNA, 359 bp, Homo sapiens
  misc_feature 329, 333, 334, 340, 343: n = A,T,C or G
accacctggatgtggacctttgctacctgtattaataccagtggcctcattttgctgtatcattacaatttggcttcttatattaatgtttgaaaaggattaaagctggtattctagaacatgcccttcactggttgtgtaaataaaactgtagaatgacacttcagatgaagttagtgtgattttaattgtgcactacaaccgagctgtaaccagttactaattttagaatgtaatcccaggacaatattaagcaaatagcctgcagtgcttcctgtgaaatagtgaaggaggagggcatttctgtattccaggacttcttggggttncagnntgggtntgnatgatttttttttttt

SEQ ID NO: 1109 - DNA, 242 bp, Homo sapiens
  misc_feature 13, 160: n = A,T,C or G
gcgagacctccgngcccgaccatgtcgtctggtccctgttcaacaccctcttcttgaactggtgctgtctgggcttcatagcattcgcctactccgtgaagtctagggacaggaagatggttggcgacgtgaccggggcccaggcctatgcctccaccgncaagtgcctgaacatctgggccctgattctgggcatcctcatgaccattctgctcatcgtcatcccagtgctgatcttccag

SEQ ID NO: 1110 - DNA, 226 bp, Homo sapiens
actagaggaaaatatgggtgaatttttttttttttgcctatgattccaggattttaaaagttttagatgcccagagttgtggaggtatggagaagtggaccttctcatactgttggtgggaatacacaataatataatttgaccacgtaacaattctaggcacatgcatgctgtgactacttgctaggtgcatgaaggctcttgccaggggtggtcatggttcggt

SEQ ID NO: 1111 - DNA, 437 bp, Homo sapiens
acacatttttttttattttaggtgtatcaagaaccaataaatctgtggcaaagagttaacctatgcatggtaaaatacataaaatacatattcctttgtttcataataaataaacctgtagcataataaagaatagtgcaaactaccattgaaaaagttgtataaataaaacaactcattatacatcaggaatattttgttctaataagtttacgatacataaattatccccccaaaagttcataccttttctatttgaaagggctttgaaagtgaataatatgaaaatcaaataaacttttaaaatgtaaaattatctcatattcaagttttaaggtctttttctttataaaggagggtctgcatgtttcatattcatcacaacaatcttgaagacaacattgaaaggctttccaagtgacagcaccatgcactgt

SEQ ID NO: 1112 - DNA, 360 bp, Homo sapiens
  misc_feature 123, 212, 230, 242, 303, 314, 325, 336, 337, 349: n = A,T,C or G
actattgacccagcgatgggggcttcgacatgggctttagggagtcataagtggagtccgtaaagaggtatctttactataaaagctattgtgtaagctagtcatattaagttgttggctcangagtttgatagttcttgggcagtgagagtgagtagtagaatgtttagtgagcctagggtgttgtgagtgtaaatcagtgcgatgggtangggaagggagcctactanggtgtagaatangaagtatgtgcctgcgttcaggcgttctggctggttgcctcatcgggtgatgatagccaangtggggataantgtggttttcnaagaagatatnnaatatgattacnttctgtggctg

SEQ ID NO: 1113 - DNA, 220 bp, Homo sapiens
acatagtagaaaacctcaagagatgattgatatttggtctcagttgcagagtgctcatttaaaatgctaaaatagatacaaactcaattttgcatagaaaggtgtattttgaatagttcccatgttgtgttctcacattagagtaatttctatattaaaccatgaaaattgcctttatgagtgatgcccatttgagggcctctaaacccttcaatttggt

SEQ ID NO: 1114 - DNA, 373 bp, Homo sapiens
accgcagtttgtgctgaatgatatgtttggggtaaatcagtttttttcttatagaatttcggcgtttttgctgcaactgccactaattttgcatttaaaagaacaaaagaggaatgtatttttcaaaggagtgaatgaggttaaaatcaagattttgaatggtataaatatgcaactaattcagttgtaggatattattaaattttttattgctaaatatgtttctttcatacgttgcagtgcttacagttccaacagctttccaagaaaacatttccatatttgtgttatttgtaaagtatacataaataatgtaaaataatttgggattatttcaactttacattgtatgtctgaatttcatcgatggtgt

SEQ ID NO: 1115 - DNA, 344 bp, Homo sapiens
acaaatatgaatacattataatttgtaactgcatttaaaaattaaaatatttctctccaaatccaaaacaccacacaatctttatctgttctcatcttgttaccttagaaacatttgtcatatgctatcaggaaaatataggcaagacttactaatcagttattcatgatcaaagaaacatgattctccttaactgtgactttttgaatcatttatctgtatttctgaaatatcacacaattatacctctactctagagaaaaaaagaataaatacaaatatcaaggaggcaggaacattcatggaattaaagcaaaagtcacaagtgtttgacttagaaatgt

SEQ ID NO: 1116 - DNA, 378 bp, Homo sapiens; identical to SEQ ID NO: 348

SEQ ID NO: 1117 - DNA, 382 bp, Homo sapiens
actacatctgaggattccttggtcctttacaatagagtggctgttcaaggagatgtggttcgtgaattaaaagccaagaaagcaccaaaggaagatgtagatgcagctgtaaaacagcttttgtctttgaaagctgaatataaggagaaaactggccaggaatataaacctggaaaccctcctgctgaaataggacagaatatttcttctaattcctcagcaagtattctggaaagtaaatctctgtatgatgaagttgctgcacaaggggaggtggttcgtaagctaaaagctgaaaaatcccctaaggctaaaataaatgaagctgtagaatgcttactgtccctgaaggctcagtataaagaaaaaactgggaaggagt

SEQ ID NO: 1118 - DNA, 257 bp, Homo sapiens
actatagggtaaatacgggccctatttcaaagatttttaggggaattaattctaggacgatgggcatgaaactgtggtttgctccacagatttcagagcattgaccgtagtatacccccggtcgtgtagcggtgaaagtggtttggtttagacgtccgggaattgcatctgtttttaagcctaatgtggggacagctcatgagtgcaagacgtcttgtgatgtaattattatacgaatgggggcttcaatcgggagt

SEQ ID NO: 1119 - DNA, 474 bp, Homo sapiens
acagaaatgaggcgtcgcagaatagaggtcaatgtggagctgaggaaagctaagaaggatgaccagatgctgaagaggagaaatgtaagctcatttcctgatgatgctacttctccgctgcaggaaaaccgcaacaaccagggcactgtaaattggtctgttgatgacattgtcaaaggcataaatagcagcaatgtggaaaatcagctccaagctactcaagctgccaggaaactactttccagagaaaaacagccccccatagacaacataatccgggctggtttgattccgaaatttgtgtccttcttgggcagaactgattgtagtcccattcagtttgaatctgcttgggcactcactaacattgcttctgggacatcagaacaaaccaaggctgtggtagatggaggtgccatcccagcattcatttctctgttggcatctccccatgctcacatcagtgaacaagct

SEQ ID NO: 1120 - DNA, 423 bp, Homo sapiens
  misc_feature 288, 401: n = A,T,C or G
ttggattgccacacggctcacattgcatgcaagtttgctgagctgaaggaaaagattgatcgccgttctggtaaaaagctggaagatggccctaaattcttgaagtctggtgatgctgccattgttgatatggttcctggcaagcccatgtgtgttgagagcttctcagactatccacctttgggtcgctttgctgttcgtgatatgagacagacagttgcggtgggtgtcatcaaagcagtggacaagaaggctgctggagccggcaaggtcaccaagtctgcccanaaagctcaggaaggctaaatgaatattatccctaatacctgccaccccactcttaatcagtggtggaagaacggtctcagaactgtttgtttcaattggccatttaagtttantagtaaaagactggttaatgat

SEQ ID NO: 1121 - DNA, 413 bp, Homo sapiens
  misc_feature 312: n = A,T,C or G
ggaagctgaggcccagagagcctagggagcttgccacaggttgcactccaggttggggagtgcagatttgaggtgggtttttgtcaaagtccacccttcctggcactgagctggttaagaggctacgatggagcctggacccctcacattggagcagtgcccaccgacagaccccgcataaaaaaggaacagaacagacctaaccaagaaatcaggtgagcccaccgcgctcccctggtgccttcatgaggatggaggcaggtgaagactgaattgtggacatttccagaatgacaagagttttttttttgnttttatttttgtttttgagacagagtttcattctcttgcccaggctggagtacagtggtgtgatctcggcctcactgcaacctccacctcccagcttcaag

SEQ ID NO: 1122 - DNA, 486 bp, Homo sapiens
  misc_feature 391, 418, 438, 439, 471: n = A,T,C or G
acagacacaaacatataaatatatgtatgcacatatttgtcatacattttcaataaatgatatctttattattgtttaatgaccttttttctcttgtgaattttgacataaagtatattttataaaataagagagttgttgacttacgatgtattttgtataatacaattttgatctcttctgctctcgtttggttgatgtttgcctaaaatgtcttcttccacttgccactttcaggctgatttcactactagatctcaagtgactcttgaagagaggcaagttggatcttggtatataaaattttatataatccctctattcaatgtatgtgtattgattggcaagtctatttttaaaatatttattttctgaagacaaagattactgntattttattgtttaatgattcttgtangtctgtttctcattctatcnncctttgtgtctttttgatttttgtatggatangctgtcactactttc

SEQ ID NO: 1123 - DNA, 409 bp, Homo sapiens
acggtttaatttggtgatatcttaagcctttcttcccatccttaactgttcaagtatgtctgttgtaaccaataagtttattgctgtgaaattacttctgatggtagagaaggggttctataactgcttttgttttgttttggataaatttcctgttgtgtgggtggcatttttcttaacgagatttgcttctgtcttagcctcacacagggaaaatatccatttatcttctctctcgtgcttaattaatagctttatctttttttataccattttatccttttctctttaacagaaagtaaatatgtataaaatttgaaggaatcgaactaacaatacattctgtgtatattattttaatgaagaaaataaattgattactggcattggaacagtataaaataccagt

SEQ ID NO: 1124 - DNA, 215 bp, Homo sapiens
actacaagcccaccaagctaaagaggctgcccagaaagcagttaacagtgccaccggtgttccaactgtttaaaattgatcagggaccatgaaaagaaacttgtgcttcaccgaagaaaaatatctaaacatcgaaaaacttaaatattatggaaaaaaaacattgcaaaatataaaataaataaaaaaaggaaaggaaactttgaaccttatgt

SEQ ID NO: 1125 - DNA, 471 bp, Homo sapiens
tttttttttcacttaaaagaaagtttttattaacaaaagttttccttaattcacatttcaactttattaaatagtccaagggtttcatttatgaacacttattccagtttagttctcttaaattcatttgcttgttgtgcatttatgtttaaaaaggtaactaactgcactggaaaatgaaaatttatagttttatcaataggtcagtttttaaaaaatcaaaggataaggatttaaaaatattagggcattacacctttttcagaacaaggataatttacagaaattatacaaagcagattttcatcaaatatcaattatttagcgatgttttatttagctgaaatgttatttcacttgtaaaaactatctccggttacaaaaaaaatcagaaaccttattaaatttaacctgcttttacaaatgtcctaagaagtcttaagctaaacaaaatttaagtaggaaaacgat

SEQ ID NO: 1126 - DNA, 432 bp, Homo sapiens
  misc_feature 400: n = A,T,C or G
acccaatgaaggatccgatgaatggctggccagttactcagagtaatatgtttatgagttaaatggattgcataacggcaccacttttcctttgtcactgtggtggataaatgacaaagtagattccaatctcctgtatagaaaggtggttacccaatagcctcactggtggcttgctagcagagcctcaagttgcacctctgtggctttctgtaaattcgagtcctacagccacttcgagaacgctgcaatccccaaggcccacttggtccatgctgaagaagcggctgtgaccccaatcctgcctctcttttgctcttcagtattacttactggaggaatatgtaatattctaggtcaagtctaggagaggctcatcctaaaaaaaaattgcaaagtnttttctcaattaaaaacaaaaaagcctcaagt

SEQ ID NO: 1127 - DNA, 94 bp, Homo sapiens
  misc_feature 22: n = A,T,C or G
acacaaagaccaatgcatggtnctgtattgctaccaaaacatttactgtatatatgtttataacatgtattatgtatatatgtaatgggtgcca

SEQ ID NO: 1128 - DNA, 284 bp, Homo sapiens
acttctcatgagttatcactcagttttgcttctagagacccaccagtcaaagcagtaaaactaaatctccttaacaaaactgaagtcttcagaaaagcagtgctaaatgggtgatgaaaccttacttaaccactccctgtatgcaagatgacttattttgcattcctaaaacttctactttgattctcaatatatccgtttttttttctttttttcaaaagcattattttggtgaaaatcccaatatatgagtttaaaaaaaaatcattaacatcattaacagt

SEQ ID NO: 1129 - DNA, 470 bp, Homo sapiens
acattttaatttttataaagaaatgagcagttatctccctgacaccttattaaatgtataattaaccttatgatccctagctcacttgtgaatgcttggcagtataattggagaggaataatgtttctttttttcctctttctttgcagtcctaaaccttattctgtggttgttgaagcattagtttaatttttcccttttctttttaaacaaactttatacttgcaatgccaaggacagcattcaccaaagcttggcatagcttgcacttgttttcttttttcttgccttaaaaaataatagtcgactattaggccttcctattggtaataatacactactgtattattgtgaactttcttaattggaaatattcagtttgatccacttgtttatcagaaaccttcacttactgaataatgttttaatttttagagatgtggtgcaattgctgaacaaaccccgatttt

SEQ ID NO: 1130 - DNA, 373 bp, Homo sapiens
acctgaggggctcctgaaagacctactgccaggaccagtgaccctggtgatggaacgctcggaggagctcaacaaggacctaaacccttttacgcctcttgtaggcattcggattcctgatcatgcttttatgcaagacttggctcagatgtttgagggtccgcttgctctcactagtgccaacctcagctcccaggccagttctctgaatgtcgaggagttccaggatctctggcctcagttgtccttggttattgatgggggacaaattggggatggccagagccccgagtgtcgccttggctcaactgtggttgatttgtctgtgcccggaaagtttggcatcattcgtccaggctgtgccctggaaagt

SEQ ID NO: 1131 - DNA, 174 bp, Homo sapiens
  misc_feature 126, 130: n = A,T,C or G
actagaggctaatgcagttctcttgggaatccaggagagtaaagactcaagatcgaaagaagaacatcatgaaaaataaatgaactttgcttagtggattgactcctttgctgaagtcagttattncatncaagaatgcaattagactaattgtgaataaatgattgaatgaag

SEQ ID NO: 1132 - DNA, 476 bp, Homo sapiens
cagcgcctgcttcctcggccctgaaatcatgcccctaggtctcctgtggctgggcctagccctgttgggggctctgcatgcccaggcccaggactccacctcagacctgatcccagccccacctctgagcaaggtccctctgcagcagaacttccaggacaaccaattccaggggaagtggtatgtggtaggcctggcagggaatgcaattctcagagaagacaaagacccgcaaaagatgtatgccaccatctatgagctgaaagaagacaagagctacaatgtcacctccgtcctgtttaggaaaaagaagtgtgactactggatcaggacttttgttccaggttgccagcccggcgagttcacgctgggtaacattaagagttaccctggattaacgagttacctcgtccgagtggtgagcaccaactacaaccagcatgctatggtgttcttcaagaaagtttctcaaaaca

SEQ ID NO: 1133 - DNA, 328 bp, Homo sapiens
gccgcatcttcttttgcgtcgccagccgagccacatcgctcagacaccatggggaaggtgaaggtcggagtcaacggatttggtcgtattgggcgcctggtcaccagggctgcttttaactctggtaaagtggatattgttgccatcaatgaccccttcattgacctcaactacatggtttacatgttccaatatgattccacccatggcaaattccatggcaccgtcaaggctgagaacgggaagcttgtcatcaatggaaatcccatcaccatcttccaggagcgagatccctccaaaatcaagtggggcgatgctggcgctgagt

SEQ ID NO: 1134 - DNA, 416 bp, Homo sapiens
actgaattcagtgcttagaactgaagttattgagaggacagctttaaaagatgaatgaactcaaaagttcgagttgtgctcttcacgttggttcgataatggcctttatttgaaagctttttaatttttctttacagtaaatattccattctgatttcataaattaaacatttatgcctcccttttgtgttgacactgtagctcatactggaaaagtcgatcaatgttttgcagtttattgaaagtagttctatatataacaatgttataagcatttctttagaaatggttgaaaatgcttctaaaatgtgattatcgaccatggtatgcatgatcgttgtaattgttgacattccttttagaagttgtgaaatgttacaacttgtgcttatgtagacacaatcttctgtctcagt

SEQ ID NO: 1135 - DNA, 254 bp, Homo sapiens
acagaaaagccactatttatacattgttactaagacaaggaagattcagttcaactcaacttgctcttagaataagggtaaaaagtaaattaacaagtaagtgaagtatgatgttgttgccactgacattacaggtggaaatataagggaaatttaaaccagaaaaatgacacaataactttaaagaggagctgaaactttgtcaaaaaaagaaaaaaactattagcctgttttcaaagaaaaacattctaaaa

SEQ ID NO: 1136 - DNA, 463 bp, Homo sapiens
acacaatggtttattaaaggaatgtatggcccacatcaacctagcaaggattctactggtaaaccttcccatggccaaaggaaaaacaagcaggagttgagtggctggggtggggtgcaggcaatggagagagggccgaagggtgtagaagctgaagggggctagaagcttactcctgagtttcttccttctgtcttcaaatctttacttcttatggccaaagacccagctgtttcataggctggagatgcactcttctagactgctcgagacagccagagacaggggaggagggaagaaggatactgtggaaagggatggcggggcaaacatttagagctagaagccactactgggccaatgctaaagtttctgtctctaagcctaaaaaagccagtgtagtagggcccttatcactcttagtttgctaggcttcccctctgaaataatgagcagatttagc

SEQ ID NO: 1137 - DNA, 357 bp, Homo sapiens
accggcactgaacaagcatttacttaacatccaatccaggctgcatatgcacaaaatgatctgaccacatgcttatgcaaaataaagtttttcttagaaagccaaaattccaaccattctgactgtccgctgcctattcccctgttgagtattttgagcgaacttctatagaatataagaacaattggcatggcacttaaagactgcaaaaaacagaacacaattaaaaacatttataatgcatttctgtataaaatacacaccgtaaatcttattagttaaaaaaagatttaaaaacaaaagaccaccctgaataatggttaaaacctcatcatagaaaaatgctcatcattttgt

SEQ ID NO: 1138 - DNA, 207 bp, Homo sapiens
gccggacggcgcgcgtgcgtgctggcgtgcgttcattttcagcctggtgtggggcttgtaaacatataacataaaaatggcttccaaaagagctctggtcatcctggctaaaggagcagaggaaatggagacggtcatccctgtagatgtcatgaggcgagctgggattaaggtcaccgttgcaggcctggctggaaaagacccagt

SEQ ID NO: 1139 - DNA, 605 bp, Homo sapiens
  misc_feature 600: n = A,T,C or G
accacaaacacactcaacttgtctatgaattagagaacaagatactgctgctgcttctttttgtcttttgaaatatacaatgttttgtaggctctgcccttcaatgtgaaagcaggacattaaatttgaaattatttgacaattaaatgtttaggaccatctaacttcaactgcaaaactaaacagatctaccttgtccttccttcaaaccacctcacaaaaataagagaaaacaattcaaacatgattatttttttaaagtccttgaaagtattaaaactctcagagaaaaggaaaggaagaaagaaaaacaagaacaaggagggagaaaagctttaaaagaaaagtgttggggtgggggaggaatcaatgggcctctcttttatttggcgacaagcaagtgcaagaaagttcatttgtaatttgttcagttgtctgtcttttgcacatctgcattctgaccagaaggaactttgaggtttttctgcagcacatgagcatctgcgggctctatcctcttatagtagttcttctttgtctcaataatctcaaagccaaacttcctgtagaagtcaattgccgactcattgctgatctganatgca

SEQ ID NO: 1140 - DNA, 254 bp, Homo sapiens
acattacttccagtaaatatttgaaaatatattgaagtaaacttgatttttttttttgtcacaagaaaatattaagagttattgttgcagttctgatgagctgcaggttttttgaactcacttctggaggtgcagagccacaaacgcactttcggggcctagttttgctcgaatatgaatttagataggtatcaagctgtaactaagacaatatttgataaatgttggatgacatttaatttaatggagcatgt

SEQ ID NO: 1141 - DNA, 298 bp, Homo sapiens
acttcccatagtgagttacccttagtaaatactcagtaagttgaattgaatttaaattacctgtaagtcttaaaatgtgggattaaattaagaatatattgtcctggaaatacccaaatgtctattgatggatgaatggataaacaaaatgtggtatacacataatggaatattattcagccttaaaaaggaatgaaattctgacatgtgctacaatatgatgaacctggaagacattatatgtgaaataagccagacagaaaaggacaaatactatatgattccacttatatgaagt

SEQ ID NO: 1142 - DNA, 125 bp, Homo sapiens
actgctttcaacttaaatcactgaggcatttttactactattctgttaaaatcaggattttagtgcttgccaccaccagatgagaagttaagcagcctttctgtggagagtgagaataattgtgt

SEQ ID NO: 1143 - DNA, 272 bp, Homo sapiens
acccactgaggttcagtatcaagtttgttaattaacctaagcaattcctgataggctttatcaagatcggaattcacaattgccgtatcaaagtagtggccattgttctgctccatctctcttgtcttctcaatgatttctctcaactcttcaggctttggattcttgccttctttggccaataatgcccgaagtctttcttgtgaagggggtgcaatgaagataatatatggtttcaaatctgaattccggagagtcttcaatgactgtgt

SEQ ID NO: 1144 - DNA, 523 bp, Homo sapiens
acaagctgaaggtggggtgtctaacaactaaaaactatcactaaatctcaaagagaaagttcttgcaaaatatgtaaagttcacaaggtgcagacattttccttctttaggcttttatctaaggaagggctatgaaactgggcccatctgtatacaggctcaaatttacgtttttaaaggaagaatctatgcagctgaggcttattgcaggaaatacttcatttgtatgtaaatattattgtaaataaataggaggctgtatatttttgaagttgttgatccgcactgaaatagaagtctctaggatctgcatataaacaataaatgtttcctagaaattagtggttttgtttgggaattagaaaaatttacattctctcccaggtaacatagttctctcaatgtaaacttggaacctgaaaccctacttaatttagagaaagaaatgtctgagaaatagttcccttgatttcttatgctggcattaagatcaattatttaacagatagtcctctgagataca

SEQ ID NO: 1145 - DNA, 474 bp, Homo sapiens
acttatttcaacaattcttagagatgctagctagtgttgaagctaaaaatagctttatttatgctgaattgtgatttttttatgccaaaatttttttagttctaatcattgatgatagcttggaaataaataattatgccatggcatttgacagttcattattcctataagaattaaattgagtttagagagaatggtggtgttgagctgattattaacagttactgaaatcaaatatttatttgttacattattccatttgtattttaggtttccttttacattctttttatatgcattctgacattacatattttttaagactatggaaataatttaaagatttaagctctggtggatgattatctgctaagtaagtctgaaaatgtaatattttgataatactgtaatatacctgtcacacaaatgcttttctaatgttttaaccttgagtattgcagtttgctgctttgt

SEQ ID NO: 1146 - DNA, 329 bp, Homo sapiens
acaacaccaacaatatcctggaccttgaaattctgtttacttcagtccattgtatcctttaaggcacctgtgctagcctagattttgtaataacactgatttatgagaatggacaaaagtggtagggaaattgttccctctccacttctgaaagtatgatgatgtattaaggatggaggagttattaaaaatgtctcttctgatgaggtaacaattagatgaaaccatgttaaagctgagatgaacacttagaaattcagggatattgggtctttagccttatgaatttgagctgcttatttaattggtgtaatttactacatattagt

SEQ ID NO: 1147 - DNA, 191 bp, Homo sapiens
acttaccattttatctttactttaaaaacaatgccttttccaaaatataaaaaaaagacctatttttaaagaactatttaaagatggctttgaaaacaacacttttatttacaacaaatagatggtagtgcaacagcactcgtggatgtttacgataaataaaaatactagtattccggcatcctttgggt

SEQ ID NO: 1148 - DNA, 117 bp, Homo sapiens
acgaggacattttgccccgcggcttgttggggtctcctttacccatgttgacagatccgcgtccacctggtgcgagcttttcctcagagtcccgcagagcggccggacccaacggag

SEQ ID NO: 1149 - DNA, 363 bp, Homo sapiens
  misc_feature 239, 240: n = A,T,C or G
acgtgccaagcatcctcgtgcgaccgcgagagcccggggagcgggggcttgccggccgtcgcactcatttacccggggacagggagaggctcttctgcgtgtagtggttgtgcagagcctcatgcatcacggagcatgagaagacgttcccctgctgccacctgctcttgtccacggtgagcttgctatagaggaagaaggagccgtcggagtccagcacgggaggcgtggtcttgtanntgttctccggctgcccattgctctcccactccacggcgatgtcgctgggatagaagcctttgaccaggcaggtcaggctgacctggttcttggtcatctcctcccgggatgggggcagggtgt

SEQ ID NO: 1150 - DNA, 353 bp, Homo sapiens
cggctgttggtttctgctgggtgtaggtccttggctggtcgggcctccggtgttctgcttctccccgctgagctgctgcctggtgaagaggaagccatggcgctccgagtcaccaggaactcgaaaattaatgctgaaaataaggcgaagatcaacatggcaggcgcaaagcgcgttcctacggcccctgctgcaacctccaagcccggactgaggccaagaacagctcttggggacattggtaacaaagtcagtgaacaactgcaggccaaaatgcctatgaagaaggaagcaaaaccttcagctactggaaaagtcattgataaaaaactaccaaaacctcttgaaaaggt

SEQ ID NO: 1151 - DNA, 301 bp, Homo sapiens
ccgaaaggaaagaaggccaagggaaagaaggtggctccggccccagctgtcgtgaagaagcaggaggctaagaaagtggtgaatcccctgtttgagaaaaggcctaagaattttggcattggacaggacatccagcccaaaagagacctcacccgctttgtgaaatggccccgctatatcaggttgcagcggcagagagccatcctctataagcggctgaaagtgcctcctgcgattaaccagttcacccaggccctggaccgccaaacagctactcagctgcttaagctggcccacaagt

SEQ ID NO: 1152 - DNA, 244 bp, Homo sapiens
actgcaatcacaatgccagatggtgtttatgggctatttgtgtaagtaagtggtaagatgctatgaagtaagtgtgtttgttttcatcttatgaaaactcttgatgcatgtgcttttgtatggaataaattttggtgcaatatgatgtcattcaactttgcattgaattgaattttggttgtatttatatgtattatacctgtcacgcttctagttgcttcaaccattttataaccatttttgt

SEQ ID NO: 1153 - DNA, 504 bp, Homo sapiens
caggtacaaaatgaaatagacagacttaatgaacaagccagtgaggagattttgaaagtagaacagaaatataacaaactccgccaaccattttttcagaagaggtcagaattgatcgccaaaatcccaaatttttgggtaacaacatttgtcaaccatccacaagtgtctgcactgcttggggaggaagatgaagaggcactgcattatttgaccagagttgaagtgacagaatttgaagatattaaatcaggttacagaatagatttttattttgatgaaaatccttactttgaaaataaagttctctccaaagaatttcatctgaatgagagtggtgatccatcttcgaagtccaccgaaatcaaatggaaatctggaaaggatttgacgaaacgttcgagtcaaacgcagaataaagccagcaggaagaggcagcatgaggaaccagagagcttctttacctggtttactgaccattctgatgcaggtgctgatgagtta

SEQ ID NO: 1154 - DNA, 496 bp, Homo sapiens
actcatttacaataaaataaccaagtgaagttacaaaaggcatatattactgtgaaaagaacatacactccacattttgccgattaataatggcaatcataatttaacataataaaagaatatatatctattgcttttcatcatacttgataaatacagtatgaacaaaattttcattgtatacttttcacaagataataaataagttaaatagttttcatattgagttgtggtgcagtggtgcgaatcaactcaaagcagctaaaaattcagcagttattctccaacaattacaaagtaagctctgcgcaaggcttccagagggagcagacaaaatggttctaaactgaacatccactaagtggtggcaatgaaaccaagtaaccagtatggacctttggaatgcaagggttttttcacccccagacatatataattctgttaaaaaacaaaaaacacctatgggctgagggctaactatcaaggcatattcttg

SEQ ID NO: 1155 - DNA, 482 bp, Homo sapiens
accatccctgggcgctgcttcatcacatgtcgtctctctctttctgcagcacaacaagattcgcagcgtggaggggagccagctgaaggcctacctttccttagaagtgttagatctgagtttgaacaacatcacggaagtgcggaacacctgctttccacacggaccgcctataaaggagctcaacctggcaggcaatcggattggcaccctggagttgggagcatttgatggtctgtcacggtcgctgctaactcttcgcctgagcaaaaacaggatcacccagcttcctgtaagagcattcaagctacccaggctgacacaactggacctcaatcggaacaggattcggctgatagagggcctcaccttccaggggctcaacagcttggaggtgctgaagcttcagcgaaacaacatcagcaaactgacagatgaggccttctggggactgtccaagatgcatgtgctgcacctggagt

SEQ ID NO: 1156 - DNA, 237 bp, Homo sapiens
acaaggacccctgctttgccagtgcttggggtggtttccggggagcaggagtttcaattttcatgatttcatcacagcactgcttccattggccttgttgacagcaatagtaagcagcggctcttccccagtgtctgcatcctcaggttgccggtaacagaagaggtttgtgcctttcagaactccatgcacttgtgcccagttctgcatctccccagcttgctgcaccctgagggt

SEQ ID NO: 1157 - DNA, 534 bp, Homo sapiens
acagctactatccagcccagtcaacaagcccagattgtcactcggtcagtgctgcttctatgcaactgcctccaccccgactacagccccctccattacaacagatgccacagcccccgactcagcagcaagttaccattctgcagcagcctcctccactccaggccatgcaacagcctccacctcagaaagttcgaatcaatttacagcaacagcctcctcctctgcagatcaagagtgtgcctctacccactttgaaaatgcagactaccttagtcccaccaactgtggaaagtagtcctgagcggcctatgaacaacagccctgaggcccatacagtggaggcaccttctcctgagactatctgtgagatgatcacagatgtagttcctgaggttgagtctccttctcagatggatgttgaattggtgagtgggtctcctgtggcactctcaccccagcctcgatgtgtgaggtctggttgtgagaaccctcccattgtgagtaaggactgggacaatgaatactgcagca

SEQ ID NO: 1158 - DNA, 342 bp, Homo sapiens
acatcctctctcctctacagagcctcaatgtttaatacatacatgtgactttagtcataaaaccacatagtccaggaaaaaaggagccctttagaaaaaaaaaatcagtttagaatgactttcaaattgaccattccttttcaaatacttaaattcaaataacagatacattcagaggcccaaatgttggcatagaataaaatcatgttcatttattttttttctgcatcttagaattagaaggcataaaattaaatatgttgaatgtaataaattcatccatacaagtgcaagtctccagatataatgcattttatggcagatttattattttaaaaatgt

SEQ ID NO: 1159 - DNA, 367 bp, Homo sapiens
  misc_feature 341, 344, 353, 359: n = A,T,C or G
acacttttttggggatatgcttagtaatgctacgtgtgatttttctggaggttgataactttgcttgcagtagattttctttaaaagaatgggcagttacatgcatacttcaaaagtattttcctgtaaaaaaaaaagttatataggttttgtttgctatcttaattttggttgtattctttgatgttaacacattttgtataattgtatcgtatagctgtattgaatcatgtagtatcaaatattagatgtgatttaatagtgttaatcaatttaaacccattttagtcactttttttttccaaaaaaatactgccaagatgctgatgttcagtgtaaanttntttgcctgntcagtnacagaaag

SEQ ID NO: 1160 - DNA, 338 bp, Homo sapiens
  misc_feature 53, 138, 146, 152, 224, 234, 253, 306: n = A,T,C or G
acaagctttttttttttttttttttttttttttttttttaggaactaaaaaanaactttatttattgagggcaaggggatgcaaacaatacaaaaatcaaaagcttatctggtatttaacttttctttctctgcttgncaaatganagttanattttatttttacatttgctaagtgtcctgatctgctcatgaaatccttctatgggggaagctgtggggcanattccttaancgaccctttgggacaactnttatcagggaggagcgaactgctcatttctgcctacttcttttccctaattgngggcctcaccattgcatgcaatgactattttg

SEQ ID NO: 1161 - DNA, 316 bp, Homo sapiens
gaagcagtgctgctacagaccccagcccaggcaggggaagagcccctgggtgtgggcagtgtggctgctggaggacgctatgatgggctagtgggcatgttcgaccccaaagggcgcaaggtgccatgtgtggggctcagcattggggtggagcggattttctccatcgtggaacagagactagaggctttggaggagaagatacggaccacggagacacaggtgcttgtggcatctgcacagaagaagctgctagaggaaagactaaagcttgtctcagaactgtgggatgctgggatcaaggctgagctgctgt

SEQ ID NO: 1162 - DNA, 320 bp, Homo sapiens
acacatacagtggtaagtgtggtgcttgcctcaggtaggcagtcagatgaataactggatggtctccaaatacaccaagagctcaccctcttgcagtgctgtctgcctggaatgttcttttcctctttcactgccagattcctacttttccttcagggactaccttctctaggaagtccttaactcctgatctcccaccatggaggtctgtttcctgggatcccactgtccctgcacatccccatcacagcccagagaagccttaggcctgactcatctctgcccccagcatcacccagtatgggagaagggaggcttta

SEQ ID NO: 1163 - DNA, 246 bp, Homo sapiens
actacatgatgaaattcttaataaacctatggaaacacttaaacttgctattccatcagggatctatactcttcagaataatttactgtatgtggcactatcaaatctagatgcagctacttatcaggtcacgtatcagttaaaaattcttacaacagcattattttctgtgtctatgcttagtaaaaaattgggtgtataccagtggctgtccctagtaattttgatgacaggagttgcttttgt

SEQ ID NO: 1164 - DNA, 330 bp, Homo sapiens
acaaggggtccagaacttgcagaatttgcaaatacagaatactgctgcccaacaaataactttgacgcctgttcaaaccctcacacttggtcaagttgcggcaggtggagccttcacttcaactccagttagtctaagcactggtcagttgccaaatctacaaacagttacagtgaactctatagattctgttggtatacagctacatccaggagagaatgctgacagtcctgcagatattaggatcaaggaagaagaacctgatcctgaagagtggcagctcagtggtgattctaccttgaataccaatgacctaacacacttaagagt

SEQ ID NO: 1165 - DNA, 66 bp, Homo sapiens
acctctccaggagcctttgccttaatgtatctctgcctggacaacttgtggtggggggtgggggga

SEQ ID NO: 1166 - DNA, 474 bp, Homo sapiens
acaagtcataaacacagtgtgcagcagtgatgatccacaggggcgtgatgacagagcccccgcacaggtggtagccctggaactgaaggctggcctgccagggccactgcgagagcaaggacatgtttccacccacgatgcgtgagctgtagccccttctatgaccacaggctgtgcactgcaaggtaaccacgtggccagaggcacatccctccctcacatatactgagtggtgtaatgcagtcaccttgtcatctggcaagaggtgatcgatggacacaaactcctcccggaactgcccctccagcgagctcactctgaggttatctgaactcacatagcttgggaaacccagttgggcacaggcaacatttgcgtagtgacccttccagtcatcggagcacatggtcttccacgaagcagctgtgaacacctggagcacggcattctgaccacccacccggacacagcggt

SEQ ID NO: 1167 - DNA, 275 bp, Homo sapiens
acagggtattaaacaaataccaaggggaacagttaacttcaatacaaggtcaaaatcagcaacaagttctacaatccagtgctgatatcagatacaagcttcaaggacaatttcttttcgaaggcttattccagtttcgtgaggctagcatgaggtgtgtgcatttgccaggggcaaatttctattctcaattaacccatgcaacaaatgctacgcatctgctgagtccgtttagaagcatttgcggtggacgatggaggggcccgactcgtcgt

SEQ ID NO: 1168 - DNA, 257 bp, Homo sapiens; identical to SEQ ID NO: 1118

SEQ ID NO: 1169 - DNA, 239 bp, Homo sapiens
  misc_feature 223: n = A,T,C or G
tttttttttttttttaacttaaatgcttttattgacaatgtcttggaacaataagcaaacaatgcttaaatttttcattcaaattcactttccacatgtcaaaagacctcaaggtagaaaaaaataaaataaaaatataaatatctgagaatccatcttaataaataaattaaaaacacaataaaacgttttcatggaaaactgttaatgtcagaacattcanaccacctcaacaatgc

SEQ ID NO: 1170 - DNA, 334 bp, Homo sapiens
acacagttagtgggagcacactatataaatcctttgcatgacaccattcaacaatattttttaaaatctacaaaattttaaagtttcacttccctagcaaaatatcttcagtcaagaaattagtctttgaaaattatgaaaattgttgtgggaaatatttatacaaattattactgataatgcacatatattttgaaacattgtttctagaagcaataaaatataacctatttaggagataacccaaatgatttgtaaaaaaattaacttgtagaaaagggaaggatgttgtgtaaaatcaagtcaattatttgaggtttttataatattgagt

SEQ ID NO: 1171 - DNA, 278 bp, Homo sapiens
acctgggattacaggtgcgtgccaccgtgcccggctcatttttgtattcttagtagagacggcatttcaccatgttggccaggctggtctcaaacccctggcctcaactgatccactctcattggccttccaaggtgctgggattacaggcgcgagccaccacaaccggctcagtaaatacattttttattatcaaaaaagagtagtgtatggttggcgtattctgtgtagaatgtattttattgatgtctcctatttttataatttctgagttaagt

SEQ ID NO: 1172 - DNA, 479 bp, Homo sapiens
actgaaaaactgtaatttttcagctgaaaattttttaatctaactttgctagttatttttatattgcaatctatattaccaatttaggaagtgatttctgagtctcttacactgtaaaggtgcactttattttctttgtcttccccatcatgtatttattgtgtcttgataactgatattaatctaaattcaatgtgtttttatgtaaaaatttgtcagttgtttagaatatttcactttgtttttgaaacggagtgacaaggcagatttttggttagaggacgggagttgatcactatcattactttttctagtttacctgttttttatatttaaggctgctaagccatgttcagcattttaaatgtggtctatcctgacatacagtgtataacaacataactcctcggaacctcctatgtgtggtataattctactcttccaaggaacatgacttcaatactttcagtgattcaggt

SEQ ID NO: 1173 - DNA, 564 bp, Homo sapiens
acaagtcatgatggtcatcaacagctaagtgaagttagtagcaaaagagagtgccctgcttccggccaaagtgaaccacgtaatggaggaaccaatgaggaaagcaactcatcggggaatacaaacacagacccaccagctgagggtaagattaaccaagatttattctgccatgtaatggttagcaaaatgaattcatttagcaaaataactactatctaagtttccaagaggaggaacagtcacacttgggacatattacaactttcagttctggttaatttataaatacatacatttaaaaagaggtagagagcgctgatcgtgaatgcatataatctgataaaaagtaattccttgcgatattttataaagaaaacgaagagaaagaaataataaaagtaaattaatatttacctcaaaatccttatgtgcagttatcctaccaaattgaagtggcaatcccatacttctcatgagttcagcctcagaatcaagttcattttcatccaggcctatgcctttgctgccatgtgattctgcagtacctcgccgcgacccgct

SEQ ID NO: 1174 - DNA, 468 bp, Homo sapiens
acatcaaagattacatgaaatcaatcaaagggaaacttgaagaacagagaccagaaagagtaaaaccttttatgacaggggctgcagaacaaatcaagcacatccttgctaatttcaaaaactaccagttctttattggtgaaaacatgaatccagatggcatggttgctctattggactaccgtgaggatggtgtgaccccatatatgattttctttaaggatggtttagaaatggaaaaatgttaacaaatgtggcaattattttggatctatcacctgtcatcataactggcttctgcttgtcatccacacaacaccaggacttaagacaaatgggactgatgtcatcttgagctcttcatttattttgactgtgatttatttggagtggaggcattgtttttaagaaaaacatgtcatgtaggttgtctaaaaataaaatgcatttaaactcaaaaaaaaaaaa

SEQ ID NO: 1175 - DNA, 358 bp, Homo sapiens
acttttaaaaatatgcaaaatcacaaatgggactgctaaattataatgcatattttagaatgagaaacatatcttttcttcctttaaagtgccatatagagaatgacatcttataacccagagccactttgtttaaaatccaatgtgaaaagactgttatggaatgaaaagtttgcacaactccttggagcagttaaagtccgctacatgcaacataggctacaaagcactcaagacttggtagcttttctgaaatttgagtccccctcccatatttaatggaaagtaacatttacagggtgcatttacatacactataatacaggaatgatgtccctttgccagaagataaaattgt

SEQ ID NO: 1176 - DNA, 391 bp, Homo sapiens
acagctgtgtagtaaagatgccttctggtgaatttgcacgtatatgccgagatctcagccatattggagatgctgttgtaatttcctgtgcaaaagacggagtgaaattttctgcaagtggagaacttggaaatggaaacattaaattgtcacagacaagtaatgtcgataaagaggaggaagctgtaagtagtttttaagtaaaaagaaaatagtttgaagagaattataatactgcttattaggttaattgctaaaattaaaagtagacagaattggatcccaagtaatttctgaaaattgagatactgttgaaatctgcgaatgatttataagtgtcatccaatttagaattatatttgcaagaagggaatacaaattcagcacgtgt

SEQ ID NO: 1177 - DNA, 237 bp, Homo sapiens
acagtttacagttgaagagcaaacagaaaggttttctcttggtgggatatgcagaacttgggatgtgtgtatatataaatatataatatatataaatatatataatactgacttaaaaaatcaaatcccccgacatacgttttttttaatctgtgccaaaaatgtgttttcagaggaaatcttattttcatattcagactttgtattgcccactcatttgtataagtgcgcttcggt

SEQ ID NO: 1178 - DNA, 564 bp, Homo sapiens
  misc_feature 534: n = A,T,C or G
actatttctaagtaaccttctagaaaggttacaatagatgcatgctcaccagaactgtatgataatacctcattgtttcaccttaactatcaggtgatagtatattcagtcttcattattaaagcttagaggtggaacataatttatatctttttcatatccattttatatctaattaaatatgtgagttcatcacagctttgcagaagaccagatattccatttcaaaaaaagagtttggaagttggcttccactgttatggaaataattcaacttatcacccaaattttagtttattaatttccagtgctaatgtttactttggatatataatgtcaaattttgtttttctgtaagatttttaaaaagcataaaacagttactcttaattttggatggagtcatttccagtcccttctgaaataaggcagattatgaataagtaaatggaaactattgggccaattttaggatttctctgtaactaccctgcttgataaatttttatatccacttataggtcaagaatgtangtatcttttttctttctcagccatttatat

SEQ ID NO: 1179 - DNA, 421 bp, Homo sapiens
acagaagaagtaggaaaatcctacccataccacagctcactaatggagtcataatacggagtcaccgatatctcagtttacagctttacaaataacccatggagaaacaaatactaaacttacttttttgatattaatgtgtgaaaatcttaactaaaacttcagacaatctcaatattctttgaagtatcttcccagtattagatattgaggaggcaggaatgagaaatactgctttgatgctttatctttttaccatattagtcatgatttaaattgatttttaacactaatcaccatttaaaaaattaaaaccacctacataaatatgggcaaatccaactacagcagaaacatttcttagcaaatatgattaaacattccaataaatttcatgagacatgactcacaaaaacaaagt

SEQ ID NO: 1180 - DNA, 385 bp, Homo sapiens
acagtttaattattaaactgcaatctagctggatttttttagtatattcagaataactaatatggcagtgggtttgctattgatttagcacactgttcaaaaaacatattgaacaattataactttaagactccacccagtaataggtctaaagcccatagatgggaatcaagtaaaatttttaatttttaaagacacaggactaagctttattctttcttcttctatttttattaataacatattatcttgtttaaccagagttcaacctctgagctattgaataggctcttttataaaaaatagtatggggaagatgtatggaaatttccatttaatagcacaggttcaagataatccagctcactaagaaataaacataagt

SEQ ID NO: 1181 - DNA, 470 bp, Homo sapiens
actctatgcattctatctatacagaaacacctatttattattacagttgatttatgcaggattaacatttttggtgttaaaattgttaaacatcatgcttactgcacatcaactctccataatgaatctgaacttcacaatgatttaccaaacactttacttaaattactaattaaataaatgaaaaatgcaccgagccaaacaaaacttaactgggctataaagaaaaaaacccttcaaaacagtccatatacacatctatttcaaaactacctttgctagctagcccctttcccaaagttttagcctgaaaaaacagtaaaatctacacaaaattttattgcaatcatacaagggttacattaggtcaacaaatactatgatgcaattttatatttattaaactacagttcaaagcacaaatttacacattctaaatacactaaacattatctaatgaagtcacactg

SEQ ID NO: 1182 - DNA, 406 bp, Homo sapiens
acagcaattgtagtaactgacacatcctctctttgcaagctgctgactgggcacactcatgccaagtttcagaattattggtcttctgggtttttgctttttaaaagaggtgtgggagcagaggaatggaaacaatcgtgagtttttgagctagggaaagttggagctcctttaatctttttaaaggatcagtgctgccctaagtgaataaactcaattgtccatctttattttagagttttaatgaattcaaggaagggagcatagcatatctgtggcaaactattttccactcaaatcctgagttattgctgcatgctttaatttcttccctttcagcatctgagaaccttaaagccaatgtctgcgatctttttttggatatttatacttttagatatatagt

SEQ ID NO: 1183 - DNA, 537 bp, Homo sapiens
acccatgctcacacacacacacttccagttttatacaaatttttttaaaggaaagaaaccaacccaaagtattgcatttgaggtgacactccctgaagaattttatacagaggtaatatactgtttagcacagctgaaggtttttttattctttctttttttaaagtgagcccatgatttggtgtctttcccagattatcccctttgcgacaacacaagcaaaaatatttacaaaggtaaggcatagtcaaactacataaagagaaaaaatcatgaggaaaatacatgaaaaagactaaagacttcgccataacaaggtcttagtgataatagtgtccgtaaagatgtcatcagaattggtaaagtcaagcatgctgcaaatataccctttggattagaaaagagcacaattttctttttttgttttgttctgttttaagaagtggcatactgctctttctccctttggataatttcttttaagcccatcaaaggaaaaaacaaacacaattcaaacaaacactgtcaagtgattca

SEQ ID NO: 1184 - DNA, 161 bp, Homo sapiens
actaaagggcaaggttcaccactacaaaaaggaagttgtctaaaagcaagaattcaattaacgctgggtaagaaaagtcaaaacactaatgagttgtccatgaagccaactgctaagaacgcgctcaactatacgcgacatgaagacactacgcacgaagc

SEQ ID NO: 1185 - DNA, 351 bp, Homo sapiens
  misc_feature 179, 180: n = A,T,C or G
accaaatttaacttggcaaactttctattgcctgtcccatgtgcatcttatttaaaatttcccccatggaaatcactctcctgttgactatttccagagctctaggtgtttaggcagcgtgtggtgtctgagaggccatagcgccatcatgggctgatttttattaccaggtcccccannagcaggtgggaggctctgcttcctgctgccgctctgcagcctggacctgtggaccctggttgtaaagagtaaattgtatcttaggaaaccagtgtcaccttttttttcaccttttaattttatattatttgcgtcatacatttcctgtaacggaagtgttaattttactgt

SEQ ID NO: 1186 - DNA, 373 bp, Homo sapiens
acacataaagtgcacacattacctatgctgaacaatgccaagaaacataatatattgatgcaacagttttctaaaataaacataaaaatgagcccagaccatcagacaaaagcaaaacacttatttccaaatagcacaatgctgaaaattgatagcaatcctaaaacacctccaactttccttaaaagctgccaaagtccaactattttttaaaaattgattttttttacattaataaaaatctggtgacaaacattataaaaccaaatgctggacagtctttactcctttaaaattccaaatattccaacataatcacaggagtaaaaaccattttaaagtgatatgctttatgaaacaaacaacaatatgt

SEQ ID NO: 1187 - DNA, 527 bp, Homo sapiens
acttttttgtttacttgtgaaaatggccatctttaagcatatttattttctgccactttatttaaaggcaagcaatattttcttgatcataaatattttgtaatgaaatacttcctcttttccagggctttgtatgcacttgtataattacattgatggcaatgtagagtttgaatttcagtctgtaaatacttttttggaaaatagaaatttttattgctttaaagttttggatatgggtggttttcttttccgggtttggtggaaagtaatttgagaactttaaggttgtctttttaactgctggcaaaatgttgattttttaatattagataaaacgagtaaacgaaattccccagaaattagtagtaagtagggtctttgtgggttgggaagtagttttaatgtagaaagacatttacatataagtctgtttaatttcaaaggagtttgtgaaaaaaaatccatggtgaaaatgaaacaatgacatggttaatctggaacttacgttcttataccaataaaaa

SEQ ID NO: 1188 - DNA, 293 bp, Homo sapiens
caaaagttatataaaagattagtttttactataaacccttgtcttttactcagatcctagcatcccttttcacatggtttctccatgtatataacagaatcaagaaacaaattttaattaaacaatctgtaacagaatcaagaaacaaatacattttaattaaacaatctatatggaacaaacattcccaaattctaagaataaatttttctttaagttttctctgagtttggcaattgttgttttttataatttaatctgtttaaatcatcaggtcttataaaatataatgt

SEQ ID NO: 1189 - DNA, 596 bp, Homo sapiens
  misc_feature 477, 513, 550, 553, 556, 570: n = A,T,C or G
acttagaaccagaatagcatactgtataatttagtggacttagttatttcaaaagatattattccacttccctgctaaatgaaattaatcatcacctttgactttcaagaggtgaaaatagcgtgtaataaagcatatcttttagtcatcaggcctactgtgaaaagcaaatacagactgtatatattatatactagctgttattttttgcttcaattgtattttatctcttttgttaaaaaaacatgatttcatcttgtaactgaactgcacatataatatcagagaaaatcttctaatggcatgacttgtaaaatctctaccccaacaaattagtttgatatctaggagttaccttatctgaaacataatgagttatgttctacagcgtctgcaatcaaactttaaacaatcaggtccctctttcagttagtatgttgttatactgaatacatgagtgttatggaaaagatttangtctcataaatgggtgaagaaattgtcaatctacanaaactaattcattccattaggatttcttgggtagcancanggntccaaattctgatnggcctttagtgatggaaaaataacaa

SEQ ID NO: 1190 - DNA, 122 bp, Homo sapiens
acgcttgtgctttcatgattctctccatgttgccagaccatccgtgtacaagctttttttttttttttttttttttttttttcttttctttttttttttttttttttttttttttttttttt

SEQ ID NO: 1191 - DNA, 204 bp, Homo sapiens
actgttttcattgttatttaattttgtgttttttaacttctttcatgatttccttttaactgaaggttttcttagatatttagtttgctggtatattcttttaaaattgtatcattgctttctttctatattggattattgtcagagaacatgatttgcatgatattaactttttggagtatattgttgcatctttgtggccta

SEQ ID NO: 1192 - DNA, 391 bp, Homo sapiens
acaaagaaacagacctgctaatacttttcaaggacgattactttgccaaaaaaaatgaagaaagaaaacaaaataaagtggaagctaaattaagagctaaacaggagcaagaagcaaaacaaaagttagaagaagatgctgaaatgaaatctctagaagaaaagattggatgcttgctgaaattttcgggtgatttagatgatcagacctgtagagaagatttacacatacttttctcaaatcatggtgaaataaaatggatagacttcgtcagaggagcaaaagaggggataattctatttaaagaaaaagccaaggaagcattgggtaaagccaaagatgcaaataatggtaacctacaattaaggaacaaagaagtgacttgggaagt

SEQ ID NO: 1193 - DNA, 489 bp, Homo sapiens
accaagtctaccattaaaccaagccagatgtcagtagccaggattacctgtgttcggggccagggacccaatgagggtatccccttcattgatgactacatctctacccaggagcaggtggtggattacttgactcaatactcgggtataaagcctggtgacctcgatgccaaaatttcctccaagcacctaacaactctcaagtctacctacttaaagcttcgttttctcattgacattggagtcaagtttgtgggtcatggcctgcagaaggacttccgggtcatcaacctgatggtttggcagggctcttttaagagtcttcttgtgagagtgggcccctcagggtatacattgtgcctttagagaatggggaattataggtcccctaccttaagtctccccttcttttatccttgccaggtgcccaaggaccaagtccttgacactgtctacctgttccatatgccccgaaaacgaatgatttcc

SEQ ID NO: 1194 - DNA, 255 bp, Homo sapiens
acagaaaagctataaagataaatgtgacacattctttaccattaataataatatatattatctaaaatttaatttgagctaatatataactgacaatgaaatatttggaccacctaaaacaaggataaattattctgtgacaagtttatattcttgcattatgcaaaaatgattctaaaataaactattttttttcccagaaattgtatgagctatacattgctatgtaacaaattgccccaaatttagcggcgt

SEQ ID NO: 1195 - DNA, 262 bp, Homo sapiens
acttaaaagaaagatttcccattgcatacaggttattggagaaattttccttttgttgcatttgtggaagttagttttctggcccgtggcctttaattttcttaatcaacctaattacatcaggatagaggtagagtttctgtaaaagaagagacattaagagttcctgaaatttatatctggcataccgataggcttatattcaaaacatcttagtcatacgaccataaattaaaagtggagtcactaaatagtttgcagt

SEQ ID NO: 1196 - DNA, 400 bp, Homo sapiens
acattctgcacttgacatcacagagcgaactgagattagcagtcctatgttctacaattacttaatgcttagataacatttgtgcaacttgtggtagagctagatttctgtctttctatatgcacatgaggtccatagcctatataataaaactggcaaataatgcatattacatgtaaaattacaaatgcataattgacaatgtaataagcaagtagacaaatgccatgatacagaagagaattattaaataaagcactgacattgtttgatacagtgaaaaaaacactgcaattccacttttaaaatttgaagctatttacgtttatctactgatcaatatgatcagctgaatttaatggaaaaaaaatccaagaccagcagttcctcacatttgagt

SEQ ID NO: 1197 - DNA, 511 bp, Homo sapiens
  misc_feature 73: n = A,T,C or G
tcacaatatcaagaagatttggacttttaagggtttcaccgaagtttgtgaccttaattagcttttacgttgntattcctacttttagcgaacaccacacagtttcaaaaatttagactatagtgtccgaacaggatgcagttaccatatgaagctttaactcaaaatttggataaagaaaaaaggcacaatgaacttcaactcaattttatgtgcacaagagttgaaaaatctgagccaccttaaagagaaattgattctaaaatttataaaacctataaataatcagaggccaaaccactatattaaaacagattctctagcaagtaaaaatcttgcagtttaaacatacgcttgtatccactttagatacaagacaaaactcactctttaaagtggctccaccttggcagatacatatatttgtaatgaatgcacacctgctatgtgttgtttatcagtgaaaacaccccagctgattcacaaagctctgatggcatctgtctcatct

SEQ ID NO: 1198 - DNA, 401 bp, Homo sapiens
acagcagtgataagcgggtaggcaggactatgtctcaccatgcagcagctctcaagcgtcacactgctcagctccgcgaagagttgctgaaacttccctgccctgaaggcttggatcctgacactgacgatgccccagaggtgtgcagagccacaacaggtgctgaggagactctaatgcatgatcaggttaaacccagcagcagcaaagaactccccagtgacttccagttatgagctgcattgatgtggacttcatagacacaaaggcttcgaagcacaagccaaatatgtcaatatttgtatgtaagaaactaattatgtaataggtaatgaaactgaaactatactatgcccttaaggagatccagtttaattcaaggtgatcttttatttacctgt

SEQ ID NO: 1199 - DNA, 254 bp, Homo sapiens
accttttccccccacagatgagaagtgtttgtaatggatttgtatttttcttaattttatgctctttagacgtttaaaagaaccaaaaaagaaacttttgcttcttcgttttcggttgggatttgcagtttaatggcctcagatccttctccagatccccagggtttctttgtcttatttatggagaaaaaccggtcactttgtccagcgcactgtgaggcccccactcaggccagccctggcccccccttggt

SEQ ID NO: 1200 - DNA, 393 bp, Homo sapiens
accaaatgtcgaattctagactgaggagtagagttcattggagtcttaaactctctgatatcacttaaagctggagtttattttaaaacaaatgaagcatgggccacctcatgatgcagtggctcctctctggttgaggagagggaaaattggaaaaactggtcgagtaattatcaataattttttttaaaaagaggatcccaaactgtaaaagattgaaataatctttctcaggattttttaaatgtctaagattatgatgtcatatctcccacttaccttataagtaaaaaggttaatatcaagtaacttattagctcttaaagtaaaattgaacttattaaaagctatctatgatttaatagatttaataaaattccttcacgacctggt

SEQ ID NO: 1201 - DNA, 329 bp, Homo sapiens
actcttgaaatggttatctttgtggatgatttttttttttaagctgaaacttacctcatgaataacttgattaaagtagtaggtgattaaaatttcaatagaatcaaatgagacaaaaattttaaactgactcatttgagtttcaactttacagtcattgaccataaagcacactaaaaatgtaagttatttttaaatacatctgaaataaaaatacttactaaaaaggaagaagccgaagatgtatatttagaccagcacacaattttgatttcaattagccttattctaatatttagcttttagatctttcatacacattttcacgt

SEQ ID NO: 1202 - DNA, 317 bp, Homo sapiens
  misc_feature 62, 297: n = A,T,C or G
actggaagatcattggtcagatgaatactgtgtctgacaaaaatgtaaactgtataaactgnggaacctcagctaatcagtattactttgtagatcaccatgcccaccacatttcaaacccaaactatctgtagatttcaaaatccattgtgtttgagtttgtttgcagttccctcagcttgctggtaattgtggtgttttgttttttgttttgttttcaatgcaaatgtgatgtaatattcttattttctttggatcaaagctggactggaaattgtatcgtgtaattatttttgngttcttaatgttatttgggt

SEQ ID NO: 1203 - DNA, 524 bp, Homo sapiens
  misc_feature 16, 17, 74, 101, 146, 179, 361, 389, 417, 429, 465: n = A,T,C or G
aataaccatgagctgnntcatgctacttagcttttatgtaaatatttcttatgtctcctctattaagagtattnaaaatcatatttaaatatgaatctatncatgctaacattatttttcaaaacatacatggaaatttagcccanattgtctacatataaggtttttatttgaattgnaaaatatttaaaagtatgaataaaatatatttataggtatttatcaagagatgattattttgtgctacatacaggttggctaatgagctctagtgttaaactacctgattaatttcttataaagcagcataaccttggcttgattaaggaattctactttcaaaaattaatctgataatagnaacaaaggtatattatactttcattacnaatcaaattatatgaaattacttgtgtnaaaagggcttcnagaatatatccaaatttttaaatattttaatatatntcctatctgataacttaatttctttctaaaatttaccacttgccattaaggctatttca

SEQ ID NO: 1204 - DNA, 530 bp, Homo sapiens
  misc_feature 499: n = A,T,C or G
acacaatggtttattaaaggaatgtatggcccacatcaacctagcaaggattctactggtaaaccttcccatggccaaaggaaaaacaagcaggagttgagtggctggggtggggtgcaggcaatggagagagggcagaagggtgtagaagctgaagggggctagaagcttactcctgagtttcttccttctgtcttcaaatctttacttcttatggccaaagacccagctgtttcataggctggagatgcactcttctagactgctcgagacagccagagacaggggaggagggaagaaggatactgtggaaagggatggcggggcaaacatttagagctagaagccactactgggccaatgctaaagtttctgtctctaagcctaaaaaagccagtgtagtagggcccttatcactcttagtttgctaggtttcccctctgaaataatgagcagatttagccaggctagcagaaaggaagaggacggggctgtgcangagtttagcagaatcttgattcttgctctat

SEQ ID NO: 1205 - DNA, 225 bp, Homo sapiens
  misc_feature 14, 18, 28: n = A,T,C or G
ccatgggatttgangatngagaatgganatagaacttaaatgattctaaattctacataaaagtgcaataatagctacggtatccggaagctacagattcagtgtgtggtggaggacgacaaggtggggacagacttgctggaggaggagatcaccaagtttgaggagcacgtgcagagtgtcgatatcgcagctttcaacaagatctgaagcctgagtgtgtgt

SEQ ID NO: 1206 - DNA, 371 bp, Homo sapiens
acaatcagtaaaatcaacacatcagtcttatattagaaagcatctctctcaagcataaaaacttgcagtaaacttggaagtatggaaagttctataactgaactttcacttctcccattccatactataactaccagtgacctggcccctacttcagcaatttttagaactgctgaacagagcaaaaatatcctttactagctgcaacatccaaacctcaaaaaaaggaattcctttggatgattccattcttaaaaactgaatgcacatctattttttttttaattttgtaaaaggctttctaaggctataagcagttaatctgaacaaaacaaaacaaaacaaaaatcacatataaaattcacccatgt

SEQ ID NO: 1207 - DNA, 464 bp, Homo sapiens
acagatatttcatgtagaattaattgctagttatgatgcttgtggatagttaactgtttttttttagtcaaaatgatcatgctacgaaaagatgcttctgagagaatgtaatgagtaactgatttttcttcctgagtcgcccttgccaaatatgttactgtattaattaatctaatattgagtgattatttgtaaaattatgaatatgggaaatccatctatctacagcctaagttacacataagtttcagaaagtctgattagactaaagagatatttcttctgggacagccttcttcttggtaattttgaagttctttttacaagttccttcctcagtttcagttctttccagtgttttgtagctcactgtcactcactgaatagagaaacgtgtgccctatacttcctgtgacaatcattttgctgacagaatgatggatgtttaaaatattgcacaaagt

SEQ ID NO: 1208 - DNA, 516 bp, Homo sapiens
  misc_feature 348, 382, 404, 413, 415, 418, 432, 433, 439, 445, 449, 463,467: n = A,T,C or G
accgtttcccctgcctgttaataggctgattcctgcaggtttgagtaaaggaatcatctcttccttcagtgccgcattgttctttgtaagagatccgtgtcagttcaaagttgtgtaatttaaaggctagagaagaaagaagtttaaattggatcccacagtaaatattcacggatatttcaaagtagaattgtccactgtctggggttgggttcaagcatcaaggtgatcgcttcctgaacatgttcattgaccatgaggagctgtttactctggctcatattagactaccagtaattattttcagacatgatgtctcttttgaaagaaatgactttgctggactangataactgcaggggtagaagactggaaatacggngagtcagggtaggtggaaacanaaatgagtngnaangaaaaaaaaaagannttcctncaaggncatntatggtcagtaatnaaancaaaaattcatggtatgtgacttaaagactttctaagacattgtacctc

SEQ ID NO: 1209 - DNA, 470 bp, Homo sapiens
acttctccatggagcagcctgaggcgatccctttattctgggcttctctcagaaatggattcccacacagtattcaaagcaaatttccccagaggaaatcctattggaagaacttaaaaactcagaatctttttctttgtccagagagttgaggaagcttaagctaaatgatacatgttttttaaaaaaaatcagattataaatttagtttttggtgattcattaaattctttactattatagttattttctagctgttcatcttttagctaaatttgttccaaagaagcaaaagtttggtttctactaagttctggattctggatgggagattgcactgtgtgtgacatgcaagtttcatggtgtgggagattgcagagcatttgggttactgcttttactctttggaagctgttatcatctgtatctgctttaaataaagtttaaagatttggaacaaaaaaaaaaaa

SEQ ID NO: 1210 - DNA, 520 bp, Homo sapiens
  misc_feature 465, 491, 504: n = A,T,C or G
aggtactttggcctctctgggatagaagttattcagcaggcacacaacagaggcagttccagatttcaactgctcatcagatggcgggaagatgaagacagatggtgcagccacagttcgtttgatctccaccttggtccctccgccgaaagtgagggggagactatcatactgttgacagtaataggttccaatatcttcaggctgcagggtgctgatggtgagactaaaatctgtcccagatccacttccactgaaccttgatgggacccctgtttgcaaattggatgcatcgtagatcaggagcttgggggctgtccctggtttctggtgataccaatttaaatagttgctaatgtcgtgactcgcctggcaagtgatggtgactctgtctcctatagatgcagacagggaggatggagactgggtcatctggatgtcacatctggcacctgagagccagancagcaggagccccaggagctgagcanggaccctcatgtncatgctgtgtcacctc

SEQ ID NO: 1211 - DNA, 450 bp, Homo sapiens
  misc_feature 131, 132: n = A,T,C or G
acaaattgctatttgctgtggggttatcagttggcctactttccaaaaccacgaccctgtcagatccaagcagcctgaaaattcttgtgctatctgaaatttcttgtgttacctcattagatctaaaactnntaccttgcattccatgtttccagaaagctagcacactgtcttgtaggcacactattgattcaatctggaaatcaaaggtgagttctgatgacaatttcctgctagattttaatcttccttggagatttactatttttatacaacagtccaagcatacaaggatggtatctctctccagttgggttacatgagtaacatttgtctgtggggtatctgattctgtaaaccatgaagaggtagaatttggattgaccgtctcaaatcgaaccacttggttgaagtctctacctctactgacaccaacacaaactaaagggt

SEQ ID NO: 1212 - DNA, 159 bp, Homo sapiens
ctcgcccagctcgcccagcgtccgccgcgcctcggccaaggcttcaacggaccacaccaaaataccatctcaaatggaacacgccatggaaaccatgatgtttacatttcacaaattcgctggggataaaggctacttaacaaaggaggacctgagagt

SEQ ID NO: 1213 - DNA, 103 bp, Homo sapiens
ttcaatgaatggaatcccgtaactcttggccagttcgtgggcttgttttgtatcaactgtccttgttggcaaatcacacttgtttcccactagcaccataggt

SEQ ID NO: 1214 - DNA, 130 bp, Homo sapiens
acatattgaccaatggcctctgaaaaagcacattttagatactgaaattgaaggaaagaaaatgcatcttcaaacattttttggaatctcaccacatatactttgttagatttgtgtattgtagggtgtt

SEQ ID NO: 1215 - DNA, 259 bp, Homo sapiens
actgctgcttatccaaaatatacaagacaattgatgttttatataaaaccactttataagttcatttgttcccaaaaacctttttttcttttttggccttgttaaaaaaaaatgttgttacaaatatttacagcattttcttctgttagacgaacattcttaaaaactgaaaaggggaattttgatgaacagaccacgtaaaacaccagacaatgtcagaggctcctagctgtgctattttttttttcttagatacagt

SEQ ID NO: 1216 - DNA, 196 bp, Homo sapiens
acctgtcttatggaagaaatatgcaggtatataagaccacgattttctaaagtgcatattagaatttttgtttttgtaaatggttaaatacatttcctgggtaacttaggaaattaagtttttcataaggcaacagatggttaaactgattgtcatgaatacccaaagatcatgtatataatcgaagtgtattagt

SEQ ID NO: 1217 - DNA, 480 bp, Homo sapiens
actattatctatgacttcatacagttactaattcaaatataaaagacaccacacttcgaaagaaaaaaattttaaggtaatggttttaattgaattaatgagatgaaaagatagtaaagccctgtttgctacttacatgaaagaagactttaaaaaataatcactgcacaaaatgtaaagggtggggttatgctgtgatattaattttcctcaataatgtttttcttgactgttcaagaacaaattaaagtttccacggcaaatttgttttcaaaatgccgaattgcgaaacaattgctggcttcacgtttctgaatacctttaatagtttctctgcgttgcagtttgtaagtttccttgtcatgacacagtcgataaataaagaaacccaggtgatcaatgttttcaatgcgatcagtaataaccatgtgctcatgaatcagataggactgaggcaaataggttccagccttgatgttc

SEQ ID NO: 1218 - DNA, 485 bp, Homo sapiens
actgtaggattacagatggcatcacattgactgaaacattggagcaaggggaaaatggttaaaaactttgatttttgggaaatgaagggtgggaaaaatatacacagaggtctgggaaggatatttcaggcaaaacacaaaaacacaaaacacaaaaacaatcctgttcaaggattgaagaataattcagactgagtcacaattctcataaagtaagaaatttcatcaaattctatgtagctttaaaatggcttcaggtgtttttcagatttagctacttaattttatttttttacttttttatttttttacattctaacatttaaaatccaactacagaaaaatttttaactgaaagatgccttaatagaatgatctatatcccttagagaaaagattaggacagtcctttatccccttgaattactttttaaatttttaattttctgattttaattgcaataactgattatcatatatcagta

SEQ ID NO: 1219 - DNA, 257 bp, Homo sapiens
accgagagccctctgcctcatagtccggtcgtaggcatcagacatggcagggaaacgatctccaaacctttcatcattgggccctctgagagggttctgaccactgaaaccaggtaggttgatatggtcacggatcagcatgatatctccaacctcaaacttggggttcagccctcctgctgcattggtgactaccagggtgtccacacccagaaggtggaaaaccctcactgggaatgtcaccttccagagtgggt

SEQ ID NO: 1220 - DNA, 191 bp, Homo sapiens
actataagtagttggtttgtatgagatggttaaaaaggccaaagataaaaggtttctttttttttccttttttgtctatgaagttgctgtttattttttttggcctgtttgatgtatgtgtgaaacaatgttgtccaacaataaacaggaattttattttgctgagttgttctaacaaaaaaaaaaaaaaa

SEQ ID NO: 1221 - DNA, 419 bp, Homo sapiens
acgttagactcagatggaaaagtattctaggtgccagtgttaggatgtcagttttacaaaataatgaggcaattagctatgtgattgagagttattgtttggggatgtgtgttgtggttttgcttttttttagactgtattaataaacatacaacacaagctggccttgtgttgctggttcctattcagtatttcctggggattgtttgctttttaagtaaaacacttctgacccatagctcagtatgtctgaattccagaggtcacatcagcatctttctgctttgaaaactctcacagctgtggctgcttcacttagatgcagtgagacacatagttggtgttccgattttcacatccttccatgtatttatcttgaagagataagcacagaagagaaggtgctcactaacagaggt

SEQ ID NO: 1222 - DNA, 375 bp, Homo sapiens
accttggccaagcttaaagagaagattttctcagggtatttattagtgtgtccagcagggtcaggaagcaggatggaaagatgcattcagactgttaatttattaacaaggcaaatgattttgtgtttcttgatgacagactattaagtttgggacttattttcccatttgagaagttataatatatatttaagatgataagtttcctgcttaagttgtgcctttcagcttcaatgagtttaaggagcactaagggtaatgataccaatgagggttggtttattatcaaacctgaatagctgtggtttctccagtaaatattttcttctactgaacatggagccattattaagagttgtgtgttttttattatgt

SEQ ID NO: 1223 - DNA, 273 bp, Homo sapiens
acatttcaggttaatagagaactacattttgggtttttagaaaggcagcaataattatattttggcttttagtctagatgcttaacatagttaaggcgacagttcaagcatattaagtgaaggtagttaaaatttaagaatcatcacaatctcttgaaacctacatacactgtttaatgcttacatggaatgaaaccagtgttcttaattggcattttacacacacacacacagaatttaaaaaaaaaaatcaaaggcaatcattctaaatgt

SEQ ID NO: 1224 - DNA, 530 bp, Homo sapiens
accatggagaaggagtcgaaaaccacccgattctgtcttatctgtaactatgtcagtcgaataattgaacccctgacctctagatgttcaaaattccgcttcaagcctctgtcagataaaattcaacagcagcgattactagacattgccaagaaggaaaatgtcaaaattagtgatgagggaatagcttatcttgttaaagtgtcagaaggagacttaagaaaagccattacatttcttcaaagcgctactcgattaacaggtggaaaggagatcacagagaaagtgattacagacattgctggggtaataccagctgagaaaattgatggagtatttgctgcctgtcagagtggctcttttgacaaactagaagctgtggtcaaggtaaagtcagcttactaactttggggaaaggaatattaagtcatcataccaaaagttttttttattataggatttaatagatgagggtcatgcagcaactcagctcgtcaatcaactccatgatgtggttgtagaaaataact

SEQ ID NO: 1225 - DNA, 91 bp, Homo sapiens
acttgtggaagatggccacgaggaggccaatggcctgatccagggggcatgccatggctgagggctgggcttggagcggtagggaggcggt

SEQ ID NO: 1226 - DNA, 254 bp, Homo sapiens
attaggaggaggaccttagggagaccaagaggagagaagcatttcttttgatgaagtcacatcctgtctatgagcccactaatgctgtaacattggcctgaaagagagtgttctttaaaagcctttctcggctgttagtataaaaacatgatggtatcagctcttagcatgtttgcttgacccttatggaaggtataaatccacagaacttccttcccagagaactgggaaattgtcctagaaataaaccttgt

SEQ ID NO: 1227 - DNA, 390 bp, Homo sapiens
atttaaaggaggtgactaaatttttggcactggtctgcattctaagggaagaaagctttgaaagaaaaggtttaatagactacaacttccactgtttccgaaaagctattcatgaggtttttgaggtgggtgtgacttctcacaggagctgtggtcaccagactagtgcctccagtctgaaagcgctgacacacaatggcacgccacgaaacgccatctagtctgaatcccagcgtcggggctctgtgccagcttactcttcactccagggtcggatgccacgtgctacaggacatgggagctgctgcttgtgggaatctggtgcctgttccactagagacaaggggtagagtttctcatttggatgaaaaccccttcaactggtggtgt

SEQ ID NO: 1228 - DNA, 363 bp, Homo sapiens
actagaaccataaagttctatctgatggtaaattatgtataaaactaagataaaacagataattatgctctatctcatatctactgaaagtagaaaaggaggaagagtgacacttttaaatcaaactgctctagttttagcttaatggatggttaataaacacactgctttacgctgaagtgatcagatagctatttctacagttcagaagaacttaaaaatcaggttttaaagacaaaagaaagcagactcaaaacacagacaaagcagagaagaaaacaatgcccatgagatggtcactatttagacagtattataaaaagctaaagaacacttgggctttacttcactttgatgtcttgt

SEQ ID NO: 1229 - DNA, 384 bp, Homo sapiens
acaacagaataatgcatgatgaactcacctaattatgaggtgggaggagcgaaatctaaatttcttttgctatagttatacatcaatttaaaaagcaaaaaaaggggggggcaatctctctctgtgtctttctctctctctccctctccctctctcttttcattgtgtatcagtttccatgaaagacctgaataccacttacctcaaattaagcatatgtgttacttcaagtaatacgttttgacataagatggttgaccaaggtgcttttcttcggcttgagttcaccatctcttcattcaaactgcacttttagccagagatgcaatatatccccactactcaatactacctctgaatgttacaatgaatttacagtctagt

SEQ ID NO: 1230 - DNA, 162 bp, Homo sapiens
accgctcggccatctacccgacctctgccaagcaaatggaggcagccctgagctccaaagagaactaccaaaaggttctttcagagcacggcttcggccccatcactaccgacatccgggagggacagactttctactatgcggaagactaccaccagcagt

SEQ ID NO: 1231 - DNA, 551 bp, Homo sapiens
  misc_feature 498, 505: n = A,T,C or G
acacttgaaaccaaatttctaaaacttgtttttcttaaaaaatagttgttgtaacattaaaccataacctaatcagtgtgttcactatgcttccacactagccagtcttctcacacttcttctggtttcaagtctcaaggcctgacagacagaagggcttggagattttttttctttacaattcagtcttcagcaacttgagagctttcttcatgttgtcaagcaacagagctgtatctgcaggttcgtaagcatagagacgatttgaatatcttccagtgatatcggctctaactgtcagagatgggtcaacaaacataatcctggggacatactggccatcaggagaaaggtgtttgtcagttgtttcataaaccagattgaggaggacaaactgctctgccaatttctggatttctttattttcagcaaacactttctttaaagcttgactgtgtgggcactcatccaagtgatgaataatcatcaagggtttgntgcttgncttggatttatatagagcttcttcatatgtctgagtccagatgagt

SEQ ID NO: 1232 - DNA, 145 bp, Homo sapiens
actgccgctgctcgtcaggaggccgcttgaggatgccctcgacgatgcgcttcagttcgaacaccgtgctggactccttggcgtccgtgaagatggtggtcttgtggcgccggatcatgaggaacacgtccatcgcggctgctgc

SEQ ID NO: 1233 - DNA, 523 bp, Homo sapiens
acccaagcaaagaaacagcccactggaagcctccaccttggaatgatgtggaccctccaaaggacacaattgtgaagaacattaccctgaactttgggccccaacacccagcagcgcatggtgtcctgcgactagtgatggaattgagtggggagatggtgcggaagtgtgatcctcacatcgggctcctgcaccgaggcactgagaagctcattgaatacaagacctatcttcaggcccttccatactttgaccggctagactatgtgtccatgatgtgtaacgaacaggcctattctctagctgtggagaagttgctaaacatccggcctcctcctcgggcacagtggatccgagtgctgtttggagaaatcacacgtttgttgaaccacatcatggctgtgaccacacatgccctggaccttggggccatgacccctttcttctggctgtttgaagaaagggagaagatgtttgagttctacgagcgagtgtctggagcccgaatgcatgctgcttatat

SEQ ID NO: 1234 - DNA, 336 bp, Homo sapiens
  misc_feature 13: n = A,T,C or G
actcaatattctnaaaacctcaaataattgacttgattttacacaacatccttcccttttctacaagttaatttttttacaaatcatttgggttatctcctaaataggttatattttattgcttctagaaacaatgtttcaaaatatatgtgcattatcagtaataatttgtataaatatttcccacaacaattttcataattttcaaagactaatttcttgactgaagatattttgctagggaagtgaaactttaaaattttgtagattttaaaaaatattgttgaatggtgttcatgcaaaggattttatatagtgtgctcccactaactgtgt

SEQ ID NO: 1235 - DNA, 434 bp, Homo sapiens
accaccagatacttaaagcttcaaaaagactgcccctaccaccacaggaggaccagcctaaccatacgctccaaaagatggctgtgatagatcttgtgaagcaattactgagcagatcaagatctttgggaaggaacactaaagatgttttgaatgaattatagtccactggcattttagtgtattttttttctttttagaaacacacatttctaaaaatgtcatgttacattcctgcatgtcccttttgatagcattagtggatccattggatttcttttttctttttgtgagacagcttttagtcctacctgaatttatgtgtgtttttccgacagtggttaataattatattggtgatgtagcagcaattgtgttggcagggttttcatatattattagtaattaacactaactgttggactgacttgtgt

SEQ ID NO: 1236 - DNA, 519 bp, Homo sapiens
acaaaacaggaagagatcaggctcttgtcacccactcctaaccctctgcagatttcctccgggatgctccgagatgggctggacctctgggaggttcccagagggtcggaagggaggtcctgctctgatccggggccagtttcgtcaggaagagggcggggctcaggatgctcataggctgggggcggagttttgtgtcccagactcgggatacgaaggagaggaaactaggatttccaaattctggagcaggactgaagttatttggggcagggagcttggattcgcaagatatggaattctgaagtgcggaaatatactcctagggactgagtggtcctaggctcccgggctggaggtgggacctgtgctccttgggttaagggtgaaacctcagctcctacaagctgggaggagccctgagtaacgttggtctggctctaggtgagcggttccgaggaggagcttgggtttctaggggctgggcctttaaagactggtaattaggacccagcgtga

SEQ ID NO: 1237 - DNA, 242 bp, Homo sapiens
actatgtaaattatttttgcaacttctttaacgatatcacggcaggtcatttctttcatctgaagcttctctatttccgtctttgcagcttgcctggctttgccgatggcacagccccaataaccgtatgaaacacctgatgggtcaatcatgtagagttgcgcaccgtcattcacactgtaagaccctaacatgaaactgcagccaaaaggtctaacagcactgtagagtgtatatgcatg

SEQ ID NO: 1238 - DNA, 385 bp, Homo sapiens
acatatattaaatggctatagcataaacattgttctatgggattttatagaagaaaaatcaagtggggagaattacttatgaaacattaacaaaaacccgtgatattgaagaacaagatgttctcatattcatttgatttcatctacttatttttggtgtcattttattgatgctggcccagactttccatttcccgtaattattaggtcagaaaaatgaaagcagcgggagggaacgcggtaaggcacctgtgggagacgggagcgctcctccgcaggggtgagacggtggctgccagtgttgagttcgagctgacggtgtgccaaggtcctgttttgctttatgccgttaagtgaagcgctggaagtgctggtgctcagaaac

SEQ ID NO: 1239 - DNA, 256 bp, Homo sapiens
ctgaagtggcagcagcatcagggattgcttcctcctggtatgaccatagatttgtttcgaggcaaggcagctgtcaaagatgtggaagaagaaaagtttcctacacaactgagcaggcatattaagtttggtcagaaatcacatgtggagtgtgctcgattttctccagatggtcagtatttggtcactgggtctgttgatggattcattgaagtatggaactttactactggaaaaatcagaaaggatcttaagt

SEQ ID NO: 1240 - DNA, 413 bp, Homo sapiens
  misc_feature 13: n = A,T,C or G
acctgaagtgtancgaaaatgctactatgactcttcctggaatacacccacctaccttgaaccagattatggattggatatgtctacttctggatgcaaattttactgttgttgtaatgatgccagaagcaaagaggctactgataaatctttacaagcttgtaaaatctcagatatctgtttattctgagctcaacaagattgaagtaagttttcgggagctacagaaattaaatcaagaaaagaataatagaggattatattcaattgaagtgctggagctcttctgatattatcaattctccttcatagacattttataaagctcttttatgtgaactcttgcttcatccaggcaagaacggtgttttgtttgcgaccatctcagtgtcaagagaaacgtgtcagtgagt

SEQ ID NO: 1241 - DNA, 535 bp, Homo sapiens
accactaatcgggccaatatggcttgtgagcaaaatgggtgaaaatagagggaactgactgggacctgttgtctaacatcattttaaggttgaacttgagcaaagacttagagaaagctgatggaatgccaagcatcaacgtgaagagaccctctatgcacacagtggatatgttatgcctggctgtagccaccttctcttctgaaaacaagatgggaatgacggaactgtattaaaagattaagttatccactagggagcatactagcacacttccagatcagccttgagatgctagacttcagatacagggacttgtgtcaggtggcctctagaaatgtggaagactaagatttagaaataaactaatttaaaagcaaacaaacaaaaaaaactttcgcctaggatgatctgtttacaacagaaacaaaaacattttccagtttaatccatttgactgaaagtcattgttgggctgacccttaaggaaaacttaagtttaaacttcctttgcatagtatgttttctctttttt

SEQ ID NO: 1242 - DNA, 205 bp, Homo sapiens
acaacgttaaattgtccgatttatgtgtattacttaaagctataaattgaactagatcttgccgtgctctgtattgagtataatttgtatacttttttataattaatgactaaatgatcactttggaggcagggtggtgggggtgtattagcagccaaataagcacatctgatcaaaaagaaccaggcttagattttttttaagt

SEQ ID NO: 1243 - DNA, 125 bp, Homo sapiens
tttttttttttttttttggttgacaatgagaatatttattgagggtttattgagtgcagggagaagggcttgatgccttggggtgggaggagagacccctcccctgggatcctgcagctctagtc

SEQ ID NO: 1244 - DNA, 356 bp, Homo sapiens
acatgaaactccagcagatttaatattggcatccatcatctagtcaaacctctcacatgttcttcaaatcaatcaaatttgggattctcaacattttctgtgtcaataaaaggtgtggaattagtagattcgatgaagacctgtttttccttgccacattggacttccagacgccatttggattgggtttagaagatggggaaatttagaagacgtttcttggcctgagtctcttaagagtagagatgcagaagagagagtgagaccacgaagagactggctgttgactgcagggcaccaccagccgccttggtggtggcattagttggatttggggccaacccagagttggaagt

SEQ ID NO: 1245 - DNA, 536 bp, Homo sapiens
actatctcaatagctgtatagctaacttatgtaaatcatatttatgctaattgaagagaatatatttcaccttcaggatattgtattcattttttctagccttaataaacattttataaatactgacactggggataaagttactgataatattatatttactttggcttcgcagagtaaaaattgttattcagtcacatacaacattctcgcatttttttagtcaatcctcaaactacctgagatgtaaccattattactcagttataaaaagaaaccaagattcaggtatactaaataatttgtgagtattcatgacagaacatggcaggtttgattgcaactctgtttgattccaaagtgtttgctctttccacttcatcgtaatgtatttccactttatcataatgtatttctggcaagaagcataagaatcaaaaacgtgacctgaaaaactactatggaattatttttaagtggtttgcatagactttgtttttagactttgtttaacttttcccaaaaagttgtacctc

SEQ ID NO: 1246 - DNA, 531 bp, Homo sapiens
accatttttagacttctgtctttatataatttagtttgtaaaacctagtttcatgtttaatgaattaagaaacaacatcagaacagtttagccagattttaataggcaaaaaagggttgctttggcaatggataaaagaataactgttataatacaaatctttatttaatctactttattaaatattaaaatgcaataaggcaattattgtttttaagacacttgaaattgcatttaataaatggataactggccccacacctgacatattgcacccctacttttcttctctactctaaggaaccaaaaaaattattttaaaaaacaaatcagtggtctttctaaaaacatctcaaagaggttctgactactactaaggtatttattaaatacaaatatctgaaaaataagacagccaataatatcttttaaggtatttctgctgtcttttgttctcttaaatctactcagaatggttcaactgaaagtatcccaactgaggaataaataggtgtaatttattgcttaatt

SEQ ID NO: 1247 - DNA, 498 bp, Homo sapiens
ggcccagcagccaccacagcgcctgcttcctcggccctgaaatcatgcccctaggtctcctgtggctgggcctagccctgttgggggctctgcatgcccaggcccaggactccacctcagacctgatcccagccccacctctgagcaaggtccctctgcagcagaacttccaggacaaccaattccaggggaagtggtatgtggtaggcctggcagggaatgcaattctcagagaagacaaagacccgcaaaagatgtatgccaccatctatgagctgaaagaagacaagagctacaatgtcacctccgtcctgtttaggaaaaagaagtgtgactactggatcaggacttttgttccaggttgccagcccggcgagttcacgctgggcaacattaagagttaccctggattaacgagttacctcgtccgagtggtgagcaccaactacaaccagcatgctatggtgtccttcaagaaagtttctcaaaacagggagt

SEQ ID NO: 1248 - DNA, 368 bp, Homo sapiens
acggagggtcaactggagggccaacttttctacatatgggttctgcaagactttctgtgggacttgagtatgggcagattttggtatatgtgtggccctggaaccagtccctagcgtatacaagggatgactgtattttaatggtttatagtgttaaaaagagaaaaatatccacataaacacaattttgaacactgaactattttaatatgaattaatgtcttatgtttattaccaattgatcttcaaattgcagcagcccatgagtttggttgtaagtgttcttgccattccaccccagctgtcactgagtcagtttaaaatacacacacacacacacacacacacacacagacacaagccttttg

SEQ ID NO: 1249 - DNA, 86 bp, Homo sapiens
acaacaatatgaagtccacacatctgagcaagacggaattctttcccatctacacaggcgaagcagacctctttccatgttcgagt

SEQ ID NO: 1250 - DNA, 365 bp, Homo sapiens
acccggcctcaaacaggttttttaatgcagacataagtgccctattggggtgggggagccaaaaaagacattagtaaggaagaggagcaaacaccagaattcatttatttatttctgtttgcttggacacaggttctcacttttttgtccaggctggagtgcaatggcgtgaacatggctcactgcagcctcaatctcccaggctcaagtgaacctctcacctcagccttccaagtagctgggaccacaagtgaacaccaccacacccggctaatttttgtggtttttttgtagagacagggttttctcatgttgcccaggctggtctcaattcaggcctcaagcgatccgcgtgggcaacatgg

SEQ ID NO: 1251 - DNA, 296 bp, Homo sapiens
acatgtgaaaatgatgccagaattccagaaaagttcagttcgaatcaagaaccctacaagagtagaagaaattatctgtggtcttatcaaaggaggagctgccaaacttcagataataacggactttgatatgacactcagtagattttcatataaagggaaaagatgcccaacatgtcataatatcattgacaactgtaagctggttacagatgaatgtagaaaaaagttattgcaactaaaggaaaaatactacgctattgaagttgatcctgttcttactgtagaagagaagt

SEQ ID NO: 1252 - DNA, 167 bp, Homo sapiens
  misc_feature 79: n = A,T,C or G
acaagcttttttttttttttttttttttttttttttgagatggagttcactctattgcccaggctggagtgcagtggcncaatctcggctcattgcaagctccgcctcccaggttcacgccattctcctgcctcagcctcctgagtagctgggaccacaggcgtccg

SEQ ID NO: 1253 - DNA, 222 bp, Homo sapiens
acgtgtcagcattatttaaatcaataatgcatttcacaattattgcagaaacatcactgagacatcgtaaattgtcaaactgacttgtaatccagttagatacaatttatacagaaatctatttggaattatacctaattactttttactaagaaacttcaaataattttacttcctgaagttccagattacagttgtatacacacatgcatgcatgtgtgt

SEQ ID NO: 1254 - DNA, 587 bp, Homo sapiens
  misc_feature 10, 211: n = A,T,C or G
actggctgangattctatctcagctgtcttttctaactgtgtaggttgagttttgaacacgtgcttgtggacatcaggcctcctgccagcagttcttgaagcttctttttcattcctgctactctacctgtatttctcagttgcagcactgagtggtcaaaatacatttctgggccacctcagggaacccatgcatctgcctggcatttangcagcagagcccctgaccgtcccccacagggctctgcctcacgtcctcatctcatttggctgtgtaaagaaatgggaaaagggaaaaggagagagcaattgaggcagttgaccatattcagttttatttatttatttttaatttgtttttttctccaagtccaccagtctctgaaattagaacagtaggcggtatgagataatcaggcctaatcatgttgtgattctcttttcttagtggagtggaatgttctatccccacaagaaggattatatcttatagacttgtcttgttcagattctgtatttacccatttttattgaaacatatactaagttccatgtatttttgttacaaatcttctgaaaaaaaacaa

SEQ ID NO: 1255 - DNA, 300 bp, Homo sapiens
  misc_feature 51, 130, 198, 203, 216, 217, 230, 240, 263, 274, 285: n = A,T,C or G
cttttttttttttttttttttttttttttttctttaagctcctttcttacncagggaatgagggggagctatgttctttcttcactcagcagtaactgaaaaatatgtccttaacatttcaaaaaagcanatcgtccctgtgctataaccactaaagcgtggaggtgaaatggcatgggtgtcctttatgtcaccatntgtcnacgttaatcaatnnaagcatggataanccaaactcgnggtttctttggagagcataaatntgataatacanaaacattccanagtctaaaaatttcc

SEQ ID NO: 1256 - DNA, 142 bp, Homo sapiens
accaggtctgtgcagctgatatgaatgtcttgaagagtcatgtggaacaacttgtccaaaatcaattcatatgaaagctttcagagtaaatttttttttctagctataagcatgcaataataaatctcaaacactgatttgg

SEQ ID NO: 1257 - DNA, 231 bp, Homo sapiens
actaaatggtggtctaggagcagctgggcggatagcaccgggcatattttggaatggatgaggtctggcaccctgagcagtccagcgaggacttggtcttagttgagcaatttggctaggaggatagtatgcagcacggttctgagtctgtgggatagctgccatgaagtaacctgaaggaggtgctggctggtaggggttgattacagggttgggaacagctcgtacctg

SEQ ID NO: 1258 - DNA, 533 bp, Homo sapiens
acacagattcccctttcagcagtcaacttgcctttcttttttttcttttctttttctttcttttgagacagagtcttgctctgttgcccaggctggcgtgcagtggcatgatctcagctcactgcaacctccgcctcccaggttcaagtgattctcctgcctcagcctcccaagcagctgggactacaggcacgtgccaccacgcctggccaatttttttgtactttcagtagagacggggttgcttttctattcccaagtccaaaagcctatgaagagggccagcgcaatggctcatacctgtaatcctagcactttgggtggccaagacaggaggactgcttgaggcctcacgtcaagttcaacatcagcgtgggcaacaaagtgagaccctgtctctacataaaagtaaaatcaaaagtctctggagagaattgtgttggtccagctcgggttagttgtccattcaaccggtgatacaggcagagttggggagtcatggcttctgaagcccacagtatcgactgggagca

SEQ ID NO: 1259 - DNA, 257 bp, Homo sapiens; identical to SEQ ID NO: 1118

SEQ ID NO: 1260 - DNA, 102 bp, Homo sapiens
acactatcttatgtaacctgtctggtgagtttgtttggacaacctaactcagctttatttgacatggaacctaaaatagaagataagatcttgatattctgt

SEQ ID NO: 1261 - DNA, 476 bp, Homo sapiens
actatcgtttgaaatgggaaccagatatgtttccattttatacagataattcagttgcttgaagaagagggacacaggagaaaagatttaaactattggctaaaatgaggtgtcttattattgattttcatctatatcttgtcccataatcaggaataaacagtagctacactgccttgtgtggcagccagagcgctgcttgcttgcacttttaatgattccatcaataccatgtagattgaattagcgaggagaagtaaacctttcatttctttgccagactatattgggaaatgaaaatccgtcattacttttccttgctagcaattgttcgaatatctgggataaagaaatacatacaggaaaatgttagggcagaccaagtattaaaagctaggacagagcaggacaaaggaggaaggataattctacttgtttggcaaagttacatcagttgtcttactgacacatcaggt

SEQ ID NO: 1262 - DNA, 291 bp, Homo sapiens
acagcattctggaataaagcaagagtgttcattcacacacacagtagcttcaaaactgttcgatctgtttgttcccatgtagttttctaaagatggaaaaaaaggactttggtcatcaagactactgtggccatattagattactggaacatctaagcatcagtgtgtgaccatgcgaacaaaagacttcggggagtgtctatttttaaaaaggtttatgtgtgtcgaggcagttgtaaaagatttactgcagaatcaagcccacttttaggcttaggaccaggttctaac

SEQ ID NO: 1263 - DNA, 293 bp, Homo sapiens
actgaacacaaaatacaaacaaatacattttattgcacataaaaatattttaaatgaagtattgaagtattgcacgtaatagaattgatttaggaaagtcacaaacctattataagactagtattattctaggtctgaagattacagaatatttcctaatagagatttgccacatcacatattgcacattttccaacactattctacgtcttgcaaatattcctcatagtctttgcttatgtcttttctctgtaagacactgtataaaagattataaaggcaaagaaatatgt

SEQ ID NO: 1264 - DNA, 389 bp, Homo sapiens
acgctgcttcttcagagcaatacgccgccgtttgtgctgcaggacacgtggagtaacaagacgctgaatcttgggtgctttggtcctaggtttcttacctaaaaattcaaaggactcaatcatttcaatatttgttttgttagaatccacatctactttaaaaacatcagaaataaacgtaagcttaacagcatctatgaaaacctataatgaggcctttaaaatcaaatcagaactattctaaaatgctttttgcccctccacagaaatctagaagattggttaaatattataaaaatataagggaaaccaagtcctgaaaaataaccaggctaacttttactaccttccagttttactaaaatacagtggcattatgttaatatata

SEQ ID NO: 1265 - DNA, 492 bp, Homo sapiens
ccgcatttggattggatgaattccaaattctgcttgcttgctttttaatattgatatgcttatacacttacactttatgcacaaaatgtagggttataataatgttaacatggacatgatcttctttataattctactttgagtgctgtctccatgtttgatgtatctgagcaggttgctccacaggtagctctaggagggctggcaacttagaggtggggagcagagaattctcttatccaacatcaacatcttggtcagatttgaactcttcaatctcttgcactcaaagcttgttaagatagttaagcgtgcataagttaacttccaatttacatactctgcttagaatttgggggaaaatttagaaatataattgacaggattattggaaatttgttataatgaatgaaacattttgtcatataagattcatatttacttcttatacatttgataaagtaaggcatggttgtggttaatctggtttat

SEQ ID NO: 1266 - DNA, 533 bp, Homo sapiens
actcattttaacattttatgcatgagcatgtgtcacaccaattttgggggtaacagttttgacaacaggaacaaatctaagcaatcgacaaaacagaagccggataactggctctgacccccacccccaacatttaagagatgcaaaggacacctgaattaggttaaaaaaatcaagttgatatggatatttcaacagtgttctgtgctgcaaaactgaaaataaaaccatttaatacacagcccattaatatctgagttacgcttttaggaactgtcaactcgaagattcataaaaagttgtcagcttttaaaaataaactttaagttatctaataatcaggtgaatttcaaaggaggatttactcacaacttgaaaataaattctctttcaacttcttaaaatatcctcattcagctaatgaaaaaggaaacatatatgtatcttttcggaagctcagactagcatatgcccaaaagcctaaagttaaattaatggccaccaaaattgtaaggaaatataaaaaattagga

SEQ ID NO: 1267 - DNA, 257 bp, Homo sapiens
actcccgattgaagcccccattcgtataataattacatcacaagacgtcttgcactcatgagctgtccccacattaggcttaaaaacagatgcaattcccggacgtctaaaccaaaccactttcaccgctacacgaccgggggtatactacggtcaatgctctgaaatctgtggagcaaaccacagtttcatgcccatcgtcctagaattaattcccctaaaaatctttgaaatagggcccgtatttaccctatagt

SEQ ID NO: 1268 - DNA, 540 bp, Homo sapiens
accagttctaaatgtcagttataagccacagaaaattagtcccaaatcaactggaagtgttcgccagttactacatgaaaagataagagatgcttatactcacccacaatttgtgaccgatgtaatgaagcctctgcaaattgaaaacatcattgatcaagaggtgcagacattatctggtggtgaactacagcgagtagctttagccctttgcttgggcaaacctgctgatgtctatttaattgatgaaccatctgcatatttggattctgagcaaagactgatggcagctcgagttgtcaaacgtttcatactccatgcaaaaaagacagcctttgttgtggaacatgacttcatcatggccacctatctagcggatcgcgtcatcgtttttgatggtgttccatctaagaacacagttgcaaacagtcctcaaacccttttggctggcatgaataaatttttgtctcagcttgaaattacattcagaagagatccaaacaactataggccacgaataaacaaacttaattcaattaa

SEQ ID NO: 1269 - DNA, 517 bp, Homo sapiens
gcaaaatattttattcaacaatttgcaatgtaacaattctcatttaggaaaaatagccgctcccgcctggaggaagcttcttgaatcaaaagtcgtggcagtcgaccccagaacagcgggcagagccgaccggaagaggtcccaggattcacacgagctgaccgagggacagagagggctgccccgtcacagggactggcctttctccaagtgacaaggacaaatggatccagcgggacacgcctgtggaacattttggaaaacatcctgggtggtctgggctaaatgatcaagtgaaacagaaagccaggaaggatctgtgctaattccacattctacaatttctacacttaaatttaaaacaccaaacagtttgtattcctccagcagaacctacagaaattatctactgatttttattagtatttaaatcttttcttcagtctctttagacttgacaagaatacgaagagtttcagaacagtcagagaagccttaaagctttgcatcagtgaga

SEQ ID NO: 1270 - DNA, 629 bp, Homo sapiens
  misc_feature 513, 568, 582, 599: n = A,T,C or G
acctgccagaattagcaagagctttctttaagaagacatttgtcaaactcaacaaattgaaggttaacaccttaagagttgtagttactgaccagaaatatggacagacttcttagacttggaggaggtatgcctggactgggccaggggccacctacagatgctcctgcagtggacacagcagaacaagtctatatctcttccctggcactgttaaaaatgttaaaacatggccgtgctggagttccaatggaagttatgggtttgatgcttggagaatttgttgatgattataccgtcagagtgattgatgtgtttgctatgccacagtcaggaacaggtgtcagtgtggaggcagttgatccagtgttccaagctaaaatgttggatatgttgaagcagacaggaaggccggagatggttgttggttggtatcacagtcaccctggctttggttgttggctttctggtgtggatatcaacactcagcagagctttgaagccttgtcgganagagctgtggcagtggttgtggatcccattcagagtgtaaaaggaaagggttgtnattgatgccttcanattgatcaatgctaatntgatggtcttaggacatgaaccaagacaaa

SEQ ID NO: 1271 - DNA, 487 bp, Homo sapiens
accctcaataaggttgccatgaagcatccgtcagctgtgacagcttgtaatctggatctggagaacctggtcacagattcaaaccgcagcattgccacgctggccatcaccaccctccttaagacgggcagcgagagcagcatcgaccgcctcatgaagcagatctcctccttcatgtcagaaatctcggatgaattcaaggtggtggttgtccaggccatcagtgccctgtgtcagaaatatcctcgcaaacacgccgtccttatgaacttcctgttcaccatgctgcgggaagagggtggctttgagtataagcgcgctatcgtggactgcatcatcagcatcattgaagagaactcagagagcaaggagacagggctgtcacatctgtgcgagttcatcgaggactgcgagttcacagtgctggccacccgtattctacatctcctgggccaggaggggcccaagaccaccaatccctcaaagt

SEQ ID NO: 1272 - DNA, 160 bp, Homo sapiens
actacactttatcttaattcttaatttaaaaacatgtttacaagttacaaccaacttctatgaaaagttgaaaagacaaaaaaaaaaaaaagcgagcgagagagagagcgagagagagagcgagagcagaagaaattcctaaaagtcgatttatttttgt

SEQ ID NO: 1273 - DNA, 438 bp, Homo sapiens
acatctattcctcagggagtgtggaggcacagaaactgttattcgggcattctacggagggagatattcttgagcttgttgatggtcactttgataccaagattggacacaaagtagagagtgaaagttaccgaaagattgcagacagcattgggtgctcaaccaacaacattttgtttctgacagatgttactcgagaggccagtgctgctgaggaagcagatgtgcacgtagctgtggtggtgagaccaggcaacgcaggattaacagatgatgagaagacttactacagcctcatcacatccttcagtgaactatacctgccttcctcaacctagagaagggttgttaaggcagaccgccctgttccccagagttgtccctgtagtgtctaggtttattctaatggtaaaagtaacttacttaaaaaacatatgt

SEQ ID NO: 1274 - DNA, 423 bp, Homo sapiens
acagtagcatgaatcttgggtatttcgcataatcagttaggtcaagtgaagaagtcgaaaatgtgataagaaatttgtgtgtgtgtgcacatgtaaatctgtaagccagttgacccaagagcaactgaaacatctaatttgttcagctgagatcagacattgttaaatttccattttttagaaggcaattaaaaattacaattccaacagcccacaaaccaaacaaaaaaaactgtagagagaaattaaaactatattcaaagagcctttttttttcagctcaatttcagcaccccaaggaaaataaaagcatccatgactatcacagatgaaaacaaaatgaatgtcattggaatcagttatttttccccactgaggtataaaatctatatagaaatttgatactatactataacaaattgt

SEQ ID NO: 1275 - DNA, 418 bp, Homo sapiens
acctatcaaaactattgtttaaaaagtatttttatacactgctaatctaaaattgtatttcagattgtgcctgtcataacaatagcaaatgtaaaaagttctctttcccaccacttgtttataaacctcatagttgatatttttagtgttcctactgttaaaatactctctccttgggctttgctgatactggtctttaatattctgataggtgaatttttctaatggaatgaacccatgcatatatagtatttatatgaatattttagcagtgtaatatgttgaattctagttctctgcattaccattattacgttaaagtattttttaaagcttaggtgtgaagatatgtgtctattgcagacgtccttgaaaactgcataaaacagtatgtgcctggtgtggatcttaccaaagt

SEQ ID NO: 1276 - DNA, 525 bp, Homo sapiens
acctagtgacttccaaccaaagcctttgagtatgcactaaataggtgagaagaaaggagagaaggtttttaggttagaaacctttaaccgatagaaggatatggtatgttgtaaagctggaaccaagtttgcatttttgagggcttgagatgaagggaagactcttaccagatagtaagacagctgagttttcctcagttttctcgtcttaacactagtggacaattctagcattttgtttggaggatttcagagttagcctcatggaattcaggattttttagcaagtttgcttttggttttatcttggcttttagtaatcatgttggctggtctggtcacaggtgactgtgaaacagatgccctggtcttgctttcatcactctaggatcatgaagtgctatgctatttcctggttatgaatattaaggttggaattacatttttattgattgtttggatcagagctcagttcctgtagaaaacgaactgtaaaagaccatgcaagaggcaaaataaaacttg

SEQ ID NO: 1277 - DNA, 504 bp, Homo sapiens
actctatgagtggggtggtttgagtgtggtaggcttgcaggcggattttcaaggccttttcattatcatctgatcgacggatcaagggttccccggtgatgtcatctttcatgggctcttttggagggttgaactcctcgtggtaggaacggccactcttggggtgaatcagccttcctgtgattcttcggatcagcagagagtctgggatgctgaattcaatcacagaatcaagctcctctttcctcttctccatgaggtcatcgagcatttctgcctgcctcacagtccgagggaagccatccagaagaaaaccatttttgcacaagggggtctccaaattcttctcaatgagctccactaccatttcatcactcaccagtttcccagcatccatagttgccttcagcttttttcctagctctgagccagaagccaccatggccctcagcatgtccccagtagctaaatggcagacacagaagttttcagccaatctgggtg

SEQ ID NO: 1278 - DNA, 568 bp, Homo sapiens
  misc_feature 494: n = A,T,C or G
caaatttgagacaaatagtcggattagaaataaagcatctcattttgagtagagagcaagggaagtggttcttagatggtgatctgggattaggccctcaagacccttttgggtttctgccctgcccaccctctggagaaggtgggcactggattagttaacagacaacacgttactagcagtcacttgatctccgtggctttggtttaaaagacacacttgtccacataggtttagagataagagttggctggtcaacttgagcatgttactgacagagggggtattggggttattttctggtaggaatagcatgtcactaaagcaggccttttgatattaaattttttaaaaagcaaaattatagaagtttagattttaatcaaatttgtagggtttctaggtaatttttacagaattgcttgtttgcttcaactgtctcctacctctgctcttggaggagatggggacagggctggagtcaaaacacttgnaattttgtatcttgatgtctttgttaagactgctgaagaattattttttttcttttataataaggaataaaccc

SEQ ID NO: 1279 - DNA, 346 bp, Homo sapiens
acttggagggctcagggcagtggcttctttccagtatggaaggatttcaacattttaatagttggttaggctaaactggtgcatactggcattggcccttggtggggagcacagacacaggataggactccatttctttcttccattccttcatgtctaggataacttgctttcttctttcctttactcctggctcaagccctgaatttcttcttttcctgcaggggttgagagctttctgccttagcctaccatgtgaaactctaccctgaagaaagggatggataggaagtagacctctttttcttaccagtctcctcccctactctgcccctaagctggctgt

SEQ ID NO: 1280 - DNA, 464 bp, Homo sapiens
actgtcactcagtctgtaaactacccccagagggtggtttgtttcctcattccttaaaaaaaaaacaaaaacaaataaacaaacaaaaaagaagtttactaaatttaaacactgacatcctgtgaagatgccagtctttacaggcgtttgtaaaagtagactgtggggagtatgttacactaatacaaagttttacaaatgaatacaagtgaaatatataaattacaatgaaatagaggaagattgtggctctgtcctgggttggttcttttagcagtcatattgctgttggtgagagcagcaaaagccacatatgcctccaagcactccatttattacttgaataagacacaagatgaattcaattccaccaagagccaagaggatagaaaacagagatacattccattccacaatgtgcttgggttcagtgcactcggaccatgtggaggtatccagaaggt

SEQ ID NO: 1281 - DNA, 273 bp, Homo sapiens
acagaaccgagatggattgggtgttgaagcacagtggtcccaacagtgccgacagcgccaacgatggcttcgtgcggcttcgaggactcccatttggatgcacaaaggaagaaattgttcagttcttctcagggttggaaattgtgccaaacgggatcacattgcctgtggaccccgaaggcaagattacaggggaagcgttcgtgcagtttgcctcgcaggagttagctgagaaggctctagggaaacacaaggagaggatagggcacaggt

SEQ ID NO: 1282 - DNA, 81 bp, Homo sapiens
acagatacgcatctactttttctggagccctctttcaagtctggcttatatcgtagttctgtatctaagaccccagaaagt

SEQ ID NO: 1283 - DNA, 435 bp, Homo sapiens
accaaataaatgaggtaaaaaggaagggtcatacaaagagggcactacaccagcttcttggcctcaaagaagctcttgaggtgacgcatctgccagatgccagtgaggatgaggatgacagtctgagcaatggaccaccataggaccctctggttggtgctctcgctcgtcagtcggaagcgctcttcacgatacctttggtaatcctgctccttctgaatctgttccacctgatcaagcaactggcgggcgcggagctgtagctccgtcagcttatcttttgcagcaatctcagggtagttgttggcatgctccccaacctggatgtcgagatgcacccgcagtttgccaccagcgaagagagccatcctggtagaattggagtgcagacagatttgatggtcaccgggcgtgtgggaggtgaacgtgaagcgg

SEQ ID NO: 1284 - DNA, 85 bp, Homo sapiens
  misc_feature 6, 7, 72: n = A,T,C or G
aagtgnntagaagccggcgtaaagagtgttttagatcaccccctccccaataaagctaaaactcacctgagntgtaaaaaactcc

SEQ ID NO: 1285 - DNA, 258 bp, Homo sapiens
  misc_feature 16, 17, 19, 36, 206: n = A,T,C or G
ccgggcaggtacagtnnanagatgtagatgcactanatatatctataaataaaatagtgctttaaggtaacaatattctttggctgacttaaatgcctgtggttgactcttagaaaagactaaaatgaaaatggccccactattattgtcaatcttaacacagagcttgtgcggaaggtccctatactgctgactgtcagcatctncaggtccacgatatgttctcttggtcctgataatgacttcacgagcacaagc

SEQ ID NO: 1286 - DNA, 267 bp, Homo sapiens
acacggcctcaagggatgtctcacatcctctgtctatttgagacttagaaaaatcctacaaggctggcagtgacagaactaagatgatcatctccagtttatagaccagaaccagagctcagagaggctagatgattgattaccaagtgccggactagcaagtgctggagtcgggactaacccaggtcccttgtcccaagttccactgctgcctcttgaatgcagggacaaatgccacacggctctcaccagtggctagtggtgggt

SEQ ID NO: 1287 - DNA, 378 bp, Homo sapiens; identical to SEQ ID NO: 348

SEQ ID NO: 1288 - DNA, 391 bp, Homo sapiens
actgtggcgctccgtgaaattagacgttatcagaagtccactgaacttctgattcgcaaacttcccttccagcgtctggtgcgagaaattgctcaggactttaaaacagatctgcgcttccagagcgcagctatcggtgctttgcaggaggcaagtgaggcctatctggttggcctttttgaagacaccaacctgtgtgctatccatgccaaacgtgtaacaattatgccaaaagacatccagctagcacgccgcatacgtggagaacgtgcttaagaatccactatgatgggaaacatttcattctcaaaaaaaaaaaaaaaaatttctcttcttcctgttattggtagttctgaacgttagatattttttttccatggggtcaaaaggt

SEQ ID NO: 1289 - DNA, 249 bp, Homo sapiens
acagctcatggataccacaggagatggcggccgctgggttttacttcactggggtaaaatctgggattcagtgcttctgctgtagcctaatcctctttggtgccggcctcacgagactccccatagaagaccacaagaggtttcatccagattgtgggttccttttgaacaaggatgttggtaacattgccaagtacgacataagggtgaagaatctgaagagcaggctgagaggaggtaaaatgaggt

SEQ ID NO: 1290 - DNA, 398 bp, Homo sapiens
acaggacacatcagctgagagcaaatcagtttttatgtttactcagcaccatcctcactaaaactattatttttgtcttattttcacccataaaaagtaatgtgggtcatactttattatttaatatgcatttacaaagatctaactattttagggattagcttttttaagcattcttaaagatgaaaaatacaaaaatgacttgtttttatgaattgacatgcttaagatcaactgaaaaaccaagattgagaggcttacaataaatcttttgtaaatgaaataaatggattgcagctgatttattgaaaagtcaatagatttttttgaaacagccaagatcactgaaaatattcagactctcctcacatctagtaagcgttaataaatacagttgt

SEQ ID NO: 1291 - DNA, 288 bp, Homo sapiens; identical to SEQ ID NO: 598

SEQ ID NO: 1292 - DNA, 294 bp, Homo sapiens
  misc_feature 108, 247, 274, 279: n = A,T,C or G
gtaccagcttccccatatgacctgtgaagacctcagcaacctggaatggctgagacaagaaacgctgtattttccgtgcacgggacacggtcaacttgtcttcctcanaaagttcatccatacccaggatggcaatgatatcctggagggatttgtagtcctgcaggatcttttgcaccccacgggcaacatcgtaatgctcactgccaacaatgttgggatccatgatacgagaggtggagtctanaggatccacagctggatagatgcccanctcancaatggcacgcgaca

SEQ ID NO: 1293 - DNA, 334 bp, Homo sapiens
  misc_feature 13, 15, 284: n = A,T,C or G
actcaatattatnanaacctcaaataattgacttgattttacacaacatccttcccttttctacaagttaatttttttacaaatcatttgggttatctcctaaataggttatattttattgcttctagaaacaatgtttcaaaatatatgtgcattatcagtaataatttgtataaatatttcccacaacaattttcataattttcaaagactaatttcttgactgaagatattttgctagggaagtgaaactttaaaattttgtagattttaaaaaatattgntgaatggtgtcatgcaaaggatttatatagtgtgctcccactaactgtgt

SEQ ID NO: 1294 - DNA, 263 bp, Homo sapiens
  misc_feature 14: n = A,T,C or G
actggaagatgtcnctgagtttgaaatcacaccagaaggaagaaggattactaaattagatcagattttgctaaatggaaataatataacaatgctggttcctggaggagaaggacctgaagtgtgaatgagtttccttgacttacactagattttgttttggcttataatgacaagaaaatggaattttttttcccactttctaatgtttaaatcccataaagctaagtttcccgttaaagggaagtgctttgaagatgtgt

SEQ ID NO: 1295 - DNA, 330 bp, Homo sapiens
acacagacacaaataaaataatattaaaaataaaaatcacacttgctttcaaggcagtggtcctggcactccacatacataatcaacttttcctttaaagaaattgcttggcccaaggagaccacagttagagaaccactaataaagctgtagcccgttgcctgcaacattttcaattcgggtttcaaaaatatataaataatttaattacaaaacccaacattttttttctcttttggcacagtgaagcatcggtcaatagcaagaaatcactgaagagcctctgacatgtctctcacactcagtcatacctggaaatgccacatacgt

SEQ ID NO: 1296 - DNA, 320 bp, Homo sapiens
  misc_feature 13: n = A,T,C or G
acaatgaaaccanactggcgggatggaagcagattattctgccatttttccaggtctttgagttgcacgtcaaatctggggctgatcaccccacacttgtttagcctgcctgtgaggttcacaacaattttcccagctctgtggtcatcaatgatttcaaattcgccaatgtaaccatgcttcatcatcacagtgagaaaccggacgatgactttggagcacggcctaataagcacctggcgtttgcctctcttttcggcattgttgatactcttgagagcatctgccaggacattcatgcgcaccattgtggcggcgcg

SEQ ID NO: 1297 - DNA, 598 bp, Homo sapiens
  misc_feature 549: n = A,T,C or G
gtcttaaggagctttccgacttcctccgagtccagcagtccctgggcaccaggaaggaactgcagaaggagctccaggagcgtctttctcaggaatgcccgatcaaggaggtggtgctttatgtcaaagaagaaatgaagaggaatgatcttccagaaacagcagtgattggtcttctgtggacatgtataatgaacgctgttgagtggaacaagaaggaagaacttgttgcagagcaggctctgaagcacctgaagcaatatgctcccctgctggccgtgttcagctcccaaggccagtcagagctgatcctcctccagaaggttcaggaatactgctacgacaacatccatttcatgaaagcctttcagaagattgtggttctcttttataaagctgatgttctgagcgaagaagcaatactgaaatggtataaggaagcacatgttgctaaaggcaaaagtgtttttcttgaccagatgaagaaatttgttgagtggttacaaaatgcagaagaagaatccgaatcggaaggtgaggaaaattaantggctcaacaggcacaatacctaggttaccacacaccactttttgattg

SEQ ID NO: 1298 - DNA, 397 bp, Homo sapiens
  misc_feature 11: n = A,T,C or G
acagcagaaanatgccaggcaatggtttgctgagctttctgtggatatggaaaagattttggaaataatcagggtttttttaaaactatatgagcagtggaagaatttcgatgagagaaaagagatggcaaccattcttagtaagatgccaaaaccaaaaccacctccaaacagtgaaggagagcagggtccaaatggaagtcagaactctagctacagccaatcttaaaacattccgaagaattccatagtggaccacttggaaataaaccattggacagatttcagtaatgtcttcagtggaacacaaatgaaaatgaatagcttgtttctgtcaagcatattggaaagtgattttatttttgcaaaataagtttttctttaatatgattctagt

SEQ ID NO: 1299 - DNA, 159 bp, Homo sapiens
actcatcgaacctgatgcgcccatcatgattggcatccaggttctggatgagcttatccgcagccttccggttccctgtgtccgacagcatgtggttcagctctttctggagcatctcgcggaagctgctcttgctgatcttgttcttgaccaggctgt

SEQ ID NO: 1300 - DNA, 549 bp, Homo sapiens
  misc_feature 14, 15, 17, 500, 527: n = A,T,C or G
agcgtgggcggggnngntgtacagggagaactcacagctccaagagcttccctccaaattatgatgaagttcctgtaaataactagatttcctacagcctggtcctctgcccatgggaaggaggggaaatggatgtgaaaagcaatgtggtctgccctcctgtcattcatagatccagttctgagcacagctcgtgtaatctaccagttcctcagggtgaaaccacaagccgatctccttctctgcactctccacagaatcactgccatgtataatgttcctgccaacttgtatgcagaagtctccacggatggtcccaggcttggagtctgcagggttggtctccccgagcatgactcggcccgtcttcaccacattcagcccctcccagaccatggcaactaccggccctgagtgcatgtatttcaccaaggccggcaaagaatggacggtccttcaggtcaacgtagtgttccttgagaagatcttcggaagcttgnatggaatttcagaccaacaaaggcggnatcctttctgctcaaaaacgct

SEQ ID NO: 1301 - DNA, 296 bp, Homo sapiens
actgcacgaagaggatcccgttcaccatcaccttgaaatctgagctctgcaccaggaaggattatatagctggccgggcacagtggctcatgcctgtaatcccagcactttgggagtccgaggcgggtggatcagttgaggtcaggagtttgagaccagcctggccaacatggcaaaaacccatctctactaaaaatacaaaaatttagccgggtgtggtggcgggctcctgtaaccccaactactcaggaggctgaggcaaaagaatcacttgaacccagaggcagaggttgcag

SEQ ID NO: 1302 - DNA, 580 bp, Homo sapiens
acagtggtattttttaatacaaaataaacatctgttttatggaaaaaactatacttcatatctacacagacagctcatcttttccaaacaatagccaaaattaaaattaactacaaaatctccaaaacaggggaaactgctttagattaaacgattccaggaaaaatggacccgtaacacattacaagggtgatctaaagattgtggctggaattactgttaaagtttttttttcccaatgcattaaattgtattttggggagatttttctcacttcggcatgatctcagatcatagatgagcaaactaacattaaaatatttacagttaacttgttgctctaaaaataaaactgtttgcctcaatttatttttaaaattcacttacgtatatggaatgtgcttttactcttcttaaaaaagcagctttcatatcacacccttgtttacagaaaagctacatgtgctgcatgctgactttgacacttaagtagcttcttggatcaaaatggcttctagatactaaatgccacttaattcagcactattcttggttggtctgtataagtaacactttaaaa

SEQ ID NO: 1303 - DNA, 364 bp, Homo sapiens
acggcggcgaagtgctaaaagggaacggcgatgaacaaatgtaattaataactttctctgcgaaagctttggaaaaatcttttttttttttggtcaagcttgaggctgaataaagcctttgatgcacaaaatgggactgctgaagagtggacagttggaccttactttggtgaccccatacatttgtggtcacatgctttagccatacacatggtaacattgactatggagtcttgtgaaagtgtaatgtgcgatggctatgtagacataaagaagaaacttgtaaatatcttttttctttttttaatgtttctgatttctgaagtgcttgtatagcttttatctgcggctttaaactgacagt

SEQ ID NO: 1304 - DNA, 632 bp, Homo sapiens
  misc_feature 482, 594: n = A,T,C or G
actatctgttcccctgtcctgtgaatggaagcaaagtgctggattgtccttggaggaaacttaagatgaatacatgcgtgtacctcactttacataagaaatgtattcctgaaaagctgcatttaaatcaagtcccaaattcattgacttaggggagttcagtatttaatgaaaccctatggagaatttatccctttacaatgtgaatagtcatctcctaatttgtttcttctgtctttatgtttttctataacctggattttttaaatcatattaaaattacagatgtgaaaataaagcagaagcaacctttttccctcttcccagaaaaccagtctgtgtttacagacagaagagaaggaagccatagtgtcacttccacacaattatttatttcatgtctttactggacctgaaatttaaactgcaatgccagtcctgcaggagtgctggcattaccctctgcagaacagtgaaaggtnttgcactacattatggaatcatgcaaaaggaaaaaaagtttcatgatatctgttgtttggcagttttttgtttatctctgacagttttttagttaaatgtttagatcctcanaaactacattagtgcctactattaacttactctgtctc

SEQ ID NO: 1305 - DNA, 260 bp, Homo sapiens
  misc_feature 12, 13, 26, 44, 45, 189, 216: n = A,T,C or G
ccaagaaagatnnaccgttagggttnggttgtttttgtttttgnnttttttttcttttgaaagggtttgttaatttttctaattttaccaaagtttgcagcctatacctcaataaaacagggatattttaaatcacatacctgcagacaaactgaagcaatgttatttttaaagggtttttttcacctncttattcttagattattaatgtattanggaagaatgagacaattttgtgtaggctttttctaaagtccagt

SEQ ID NO: 1306 - DNA, 483 bp, Homo sapiens
  misc_feature 9: n = A,T,C or G
aacaattcnaccgccatattataaaaactgaaccttgacccatagctaaactttatacaaacctttattcaaaaagtatcatagatataaatgtaaaacttaaaactataaaattcctggatgaaaataatatataatcttcatgacattgggttagacaagtgttcttacattgcacatcaaaagtaaaaaaattgataaagtgaattgtatcaaaattaaaatttttgctctaaaaaagtcagtgttcaaagaatgaaaagacaagtcacagactaggaaaatctatttccaaataatgtatctgacaaaggatttgtatcaatatattaaaaaacatataaaaacagtaagaaaaggaataatccaataaaaaggggagcaaaagatctgaacagacactttgcaagaatatatcatctttaactgtaagatcatcataaggtttgaggtgatatcctgatttgatcattatacaatgtt

SEQ ID NO: 1307 - DNA, 572 bp, Homo sapiens
  misc_feature 9, 19, 461, 497, 500, 502: n = A,T,C or G
cagcagccntggtggaacnaggaggtggagaattgagagcacgatgcatacacaggtgtttctgagtagtaattagatcgctgtgaaggaaaaagcacacctttgagttttcacctgtgaacactatagcgctgagagagacagtctgaaagcagaggaagacatcgatcagtaacaccaagagacaccaaagttgaaagttttgttttctttccctctgttttatttttcccccgtgtgtccctactatggtcagaaagcctgttgtgtccaccatctccaaaggaggttacctgcagggaaatgttaacgggaggctgccttccctgggcaacaaggagccacctgggcaggagaaagtgcagctgaagaggaaagtcactttactgaggggagtctccattatcattggcaccatcattggagcaggaatcttcatctctcctaagggcgtgctccanaacacgggcagcgtgggcatgtctctgaccatctgnacngngtgtggggtcctgtcactatttggagctttgtcttatgctgattgggaacaactataaagaatctggagg

SEQ ID NO: 1308 - DNA, 500 bp, Homo sapiens
actttgttatttttccatcactaaaggccaatcagaatttggaaccatgctgctacccaagaaatctaatggaatgaattagttctgtagatgacaatttcttcacccatttatgagacctaaatcttttccataacactcatgtattcagtataacaacatactaactgaaagagggacctgattgtttaaagtttgattgcagacactgtagaacataactcattatgtttcagataaggtaactcctagatatcaaactaatttgttggggtagagattttacaagtcatgccattagaagattttctctgatattatatgtgcagttcagttacaagatgaaatcatgtttttttaacaaaagagataaaatacaattgaagcaaaaaataacagctagtatataatatatacagtctgtatttgcttttcacagtaggcctgatgactaaaagatatgctttattacacgctattttcacctcttgaaagtcaaa

SEQ ID NO: 1309 - DNA, 357 bp, Homo sapiens
acagagcacatttgtcagtatttttgccggctggtgaattcaaacaacctgcccaaagattgatttgtgtgtttgtgtgtgtgtgtgtgtgtgtgtgtgtgtgtgagtggagttgaggtgtcagagaaaatgaattttttccagatttggggtataggtctcatctcttcaggttctcatgataccacctttactgtgcttatttttttaagaaaaaagtgttgatcaaccattcgacctataagaagccttaatttgcacagtgtgtgacttacagaaactgcatgaaaaatcatgggccagagcctcggccctagcattgcacttggcctcatgctggagggaggctgggcgggt

SEQ ID NO: 1310 - DNA, 271 bp, Homo sapiens
acaaaatgaggccaagacacccttgaagaagttcttgttgaagctggctgtttccagtaaattcaaagagcttcaaaagggtatcatcaggcatgatagtttctgggacaagctcatctttgcaaagatccaggacagcctgggcggaagggttcgtgtaattgtcactggagctgcccccatgtccacttcagtcatgacattcttccgggcagcaatgggatgtcaggtgtatgaagcttatggtcaaacagaatgcacaggtggctgt

SEQ ID NO: 1311 - DNA, 294 bp, Homo sapiens
  misc_feature 9, 11: n = A,T,C or G
acataaagntntattaatattctgattctcgtgtcatagcttttatggcaggaaaggatgaggacatgccccacctgtaacgtagagcaagcaaaccaccaagtagaatcttgagattctctctcaactgttctctagaaacacgcttgtgcttttaatctgccttttaaaagggacacagaacaaaaaatggttgtttgcaaataaacatctgaaagaaagtaacagctgacctgggctgaggcatccaaacaaagcagtcattgtggaaggagacaatgcaaaccacactgg

SEQ ID NO: 1312 - DNA, 125 bp, Homo sapiens
  misc_feature 11, 12, 92: n = A,T,C or G
ttttcccatanncaatcttccttccttaggtaatttggaagaaaactatgacccatttaatttctattgtgtttcacaaaattaagtgttgntcattatactctctgaaatataggtttaatttc

SEQ ID NO: 1313 - DNA, 415 bp, Homo sapiens
cagaagggcacactttcatctaatttggggtatcactgagctgaagacaaagagaagggggagaaaacctagcagaccaccatgtgctatgggaagtgtgcacgatgcatcggacattctctggtggggctcgccctcctgtgcatcgcggttaatattttgctttactttcccaatggggaaacaaagtatgcctccgaaaaccacctcagccgcttcgtgtggttcttttctggcatcgtaggaggtggcctgctgatgctcctgccagcatttgtcttcattgggctggaacaggatgactgctgtggctgctgtggccatgaaaactgtggcaaacgatgtgcgatgttttcttctgtattggctgctctcattggaattgcaggatctggctactgtgtcattgtggcag

SEQ ID NO: 1314 - DNA, 400 bp, Homo sapiens
acccaaatgaccagatttggtaatgaccatgggtctactcatgggggtttgagtgatctaagaaaacaatggatcaaggatggatgatgaatttggatatgaaaaaccaggaatagactgaaaaccctaacacaatgaaggggagtctgaacagtgaaattataagggaaaagcttgtattaatagaagaaaatgcaaataagattatgaactctgattccaatgtggaggctgtcttcctcatgctgtatatttacattctcacctctgtctggataatttctgatttatactagagtcagagccagtcattggtggtaacagtgaggctttaagactatctcataatttagattaattctaattttctgagaatgctcttctgtctataagtggaagt

SEQ ID NO: 1315 - DNA, 209 bp, Homo sapiens
  misc_feature 16: n = A,T,C or G
cacagaagcggtggangccaaacaggtggctcagcaggaagcagagagggccagatttgtggtggaaaaggctgagcaacagaaaaaggcggccatcatctctgctgagggcgactccaaggcagctgagctgattgccaactcactggccactgcaggggatggcctgatcgagctgcgcaagctggaagctgcagaggacatcgcgt

SEQ ID NO: 1316 - DNA, 536 bp, Homo sapiens
gttaactccctcaaaggtatacccttctgcacaattatttatcagtgtgagcctggctatgaactagaggggaacagggaacgtgtctgccaggagaacagacagtggagtggaggggtggcaatatgcaaagagaccaggtgtgaaactccacttgaatttctcaatgggaaagctgacattgaaaacaggacgactggacccaacgtggtatattcctgcaacagaggctacagtcttgaagggccatctgaggcacactgcacagaaaatggaacctggagccacccagtccctctctgcaaaccaaatccatgccctgttccttttgtgattcccgagaatgctctgctgtctgaaaaggagttttatgttgatcagaatgtgtccatcaaatgtagggaaggttttctgctgcagggccacggcatcattacctgcaaccccgacgagacgtggacacagacaagcgccaaatgtgaaaaaatctcatgtggtccaccagctcacgtagaaaatgcgattgctcgaggcgt

SEQ ID NO: 1317 - DNA, 249 bp, Homo sapiens
  misc_feature 11: n = A,T,C or G
accaatctagnctcataacaaaatgaggaaatctagccctcttgccccagagagatttaaatacagagagtcttagtttggactgaaagagaaaaattgctctgatctttctaaagcttgaacattaaggcttctttgcaattttcttagagctctttgatcgttaattatatctttccatcgaagagaagcagatttcttctgagatttctgaacagttcctgggtgtttccggttctgcttcagtgt

SEQ ID NO: 1318 - DNA, 328 bp, Homo sapiens
ctcatctgaggaggcctcgtctctgaacttgggttgtgccgagagagtttgttctgtgtttcccaccctctccctgacccaagtctttgcctctactcccttaacagtgttgaattcaactgaaggcgaggaatgttggtgatgaagctgagttcaggactcggtggaccctttgggaatgggtcatgaaagctgccatggggtgaggaaagaggagacagtgggagaggacaatgactattgcatcttcattgcaaaagcactggctcatccgccctacttcccatcccacacaaacccaattgtaaataacatatgacttctgagt

SEQ ID NO: 1319 - DNA, 479 bp, Homo sapiens
  misc_feature 8, 74, 75, 334: n = A,T,C or G
acaaaatngccggaatttagctaatagaaaaacatagtaaatatttacaaaaacgttgataacattactcaagnnacacacatataacaatgtagacaggtcttaacaaagtttacaaattgaaattatggagatttcccaaaatgaatctaatagctcattgctgagcatggttatcaatataacatttaagatcttggatcaaatgttgtccccgagtcttctgcaatccagtcctcttagaaattggtttctctctttgggagattcagactcagaggcagccagaggggacaggtcaagagctgaaataatcacataactactctaattntcttcattctattgactgtgtcaagttatagacacagccaaagtgttttttcttcggcctctgatgatttgagaagatgaagaacatgagcaattttctcattgcttaaaagaaaaacttggcacataagaggctgagtgtagta

SEQ ID NO: 1320 - DNA, 196 bp, Homo sapiens
accaatgggatgcagaaactcaaggatggattctcggttcctttttttatggctacatcatcacacagattcctggaggatatgttgccagcaaaataggggggaaaatgctgctaggatttgggatccttggcactgctgtcctcaccctgttcactcccattgctgcagatttaggagttggaccactcattgt

SEQ ID NO: 1321 - DNA, 403 bp, Homo sapiens
  misc_feature 285, 295, 296, 342, 344, 362, 385: n = A,T,C or G
acggatgctacttgtccaatgatggtaaaagggtagcttactggttgtcctccgattcaggttagaatgaggaggtctgcggctaggagtcaataaagtgattggcttagtgggcgaaatattatgctttgttgtttggatatatggaggatggggattattgctaggatgaggatggatagtaatagggcaaggacgcctcctagcttgttagggacggatcggagaattgtgtaggcgaataggaaatatcattcgggcttgatgtggggaggggtgtttaangggttggctnnggtataattgtctgggtttcgccttaagaggtctggtgagaatagngnttaatgtcatttaagganagaatgaagagaagtaagccganggcgtctttgattgtgta

SEQ ID NO: 1322 - DNA, 100 bp, Homo sapiens
  misc_feature 16, 17: n = A,T,C or G
acttcaactaccatgnnaaacacatccttatctgcataaattggaatatcatgaaatggagatatatattgtcctttctcatttttgaggaagactcggt

SEQ ID NO: 1323 - DNA, 295 bp, Homo sapiens
actgtttattaaccaaccagcttacaaaaataatcatggtagacaccttagttcattcttctaataagcctgttgatctggtcctcccggttgccagcatctccaccttctacaaaatgggtggtctttttcttcattccacctcgtggaggagacaatttgaagggccacaggaagttatttgcctctttgaagcgttttccaacagtatagatctcatgaatcaaatcctccatgcagatgatgccgtatttaccaagagatcgagcaatcaaagcgtttatctgtcaaagca

SEQ ID NO: 1324 - DNA, 435 bp, Homo sapiens
  misc_feature 387, 392, 400: n = A,T,C or G
actgacctgaaggagacctaagagtcctttccctttttgagtttgaatcatagccttgatgtggtctcttgttttatgtccttgttcctaatgtaaaagtgcttaactgcttcttggttgtattgggtagcattgggataagattttaactgggtattcttgaattgcttttacaataaaccaattttataatctttaaatttatcaactttttacatttgtgttattttcagtcagggcttcttagatctacttatggttgatggagcacattgatttggagtttcagatcttccaaagcactatttgttgtaataacttttctaaatgtagtgcctttaaaggaaaaatgaacacagggaagtgactttgctacaaaataatgtngctgngttaagtnttcatattaaatacatgccttctatatggaacatg

SEQ ID NO: 1325 - DNA, 293 bp, Homo sapiens
  misc_feature 34: n = A,T,C or G
acatgctagaagtctgctgttgttggtaacacanaaacatacacagtcttcatattcaaagtcttcacggggatgtcttctgtaatttcctgcgtttgggtctcattcagaaacagctttagcttcctgctccgaaggccaaacaccttggctgcttcatacagaagaccttggtgggtgagtccattctgcccaagtgggttttcaagcaggagagtgcccactgtccccattaaacactcttgtggctctgcattcaggagctgtaggttgatatactgacaaagaagagt

SEQ ID NO: 1326 - DNA, 529 bp, Homo sapiens
  misc_feature 15, 17, 24, 34, 38, 149, 185, 199, 207, 217, 224, 247, 321,332, 353, 355, 369, 423, 430, 443, 451, 454, 468, 470, 500,504, 517: n = A,T,C or G
caagctttttttccncnttttttntttttttttngagncaaaaatatatttactggaatgtttttagttatacctgagggcaacaacatttacaacatttagcttttgttacacctataaatgtggaaattgcttgcaaaacaactgtnatatgaaaggaactatatttctgcaaatattgacanaatggttatgcatntctttcancatataattnggtactntacacaggcttcctgacccccancatgacccgctccctaatgcaataatgcaagtccttatgccattaaaatattaatatgaaatattataatcagngtttatatacncaaataatgaactggcaagtntntagtttcaaattanatccttgaaatatggaaaaatagaggctagttctctttgccttaaacataattnttaaaanaacattttgttanaaaggganaanataattggacattntnaacgttccaatttgaagtgatacttgcctnttantttcttgaaaaanaagttttgaaag

SEQ ID NO: 1327 - DNA, 507 bp, Homo sapiens
  misc_feature 12: n = A,T,C or G
gctgtatgattncgttttgaattttgtttttattttcaagagggcaagtggatgggaatttgtcagcgttctaccaggcaaattcactgtttcactgaaatgtttggattctcttagctactgtatgcaaagtccgattatattggtgcgtttttacagttagggttttgcaataacttctatattttaatagaaataaattcctaaactcccttccctctctcccatttcaggaatttaaaattaagtagaacaaaaaacccagcgcacctgttagagtcgtcactctctattgtcatggggatcaattttcattaaacttgaagcagtcgtggctttggcagtgttttggttcagacacctgttcacagaaagagcatgatgggaaaatatttcctgacttgagtgttcctttttaaatgtgaatttttatttctttttaattattttaaaaatatttaaacctttttcttgatcttaaaagatcgtgtagattggggttgggga

SEQ ID NO: 1328 - DNA, 306 bp, Homo sapiens
acctgagatcctggtgcacaacatagtgatcttcatgcgaacttcagtgaagatttcatacattggcctcatgacccagagctccttggagacacatcactatgtggattgtggaggaaattccacagctatttaacaactgctattggttcttccacacagcgcctgtagaagagagcacagcatatgttcccaaggcctgagttctggacctacccccacgtggtgtaagcagaggaggaattggttcacttaactcccagcaaacatcctcctgccacttaggaggaaacacctccctatggt

SEQ ID NO: 1329 - DNA, 568 bp, Homo sapiens
acagtctgtttcctccttcacccccagaacaaaaatcgaacttctggttggacagcgtcagatgtcactgaggtgaccccagcctgtttgcagttccaagtcttccgtgtaggcgtcactgctactggaactttgtagatgaggagcctgtatgatgatgtcctgaacatttctatcctttcctcacacagagggaagctactgggaatatcagagacaagctattattaaacaagtgtctctagtccaagacatctcctgtggcagggaaatgagggggcaggctgtatcagtgatatttttataaactctggttttagaaaaaattcttcagatggacgcattattttaagactttaacattttccaaaaccaactgaatcttatcccctccatttatccccctccagacacttctaatcaaggtcaccatctccaacttcccccatagacaataaaaatatggctggagaattctactgtaatagaaaaccaaggagatatagtaatttgacagtgtgtttcctttccatccactagacaagaataccccctcccattctttcct

SEQ ID NO: 1330 - DNA, 231 bp, Homo sapiens
  misc_feature 10, 215, 223: n = A,T,C or G
actgaggcanctccaacctcaccgtgtagtttgttcccttctcaaagcacaccggccgaggaaggacgacatatcttgagcctggtgataatgacaccacctggttgtcatcatcggggatggtattaccacatcggctgctggttggaatccttccaggtcgctgcactgtgatgacagctttttcccagtggtcgggtagctgtggctcgtancgaattangatgtcgt

SEQ ID NO: 1331 - DNA, 554 bp, Homo sapiens
ccgcatcctagccgccgactcacacaaggcaggtgggtgaggaaatccagagttgccatggagaaaattccagtgtcagcattcttgctccttgtggccctctcctacactctggccagagataccacagtcaaacctggagccaaaaaggacacaaaggactctcgacccaaactgccccagaccctctccagaggttggggtgaccaactcatctggactcagacatatgaagaagctctatataaatccaagacaagcaacaaacccttgatgattattcatcacttggatgagtgcccacacagtcaagctttaaagaaagtgtttgctgaaaataaagaaatccagaaattggcagagcagtttgtcctcctcaatctggtttatgaaacaactgacaaacacctttctcctgatggccagtatgtccccaggattatgtttgttgacccatctctgacagttagagccgatatcactggaagatattcaaatcgtctctatgcttacgaacctgcagatacagctctgttgcttgacaacatgaagaa

SEQ ID NO: 1332 - DNA, 472 bp, Homo sapiens
  misc_feature 21, 403: n = A,T,C or G
acaaggcatttctgacatttnataaacctacatttaaggggaatttttaaaggaaatgttttttcttttttttttgtttttcgagggggcaaggagggacagaaaagtaacctcttcttaagtggaatattctaataagctaccttttgtaagtgccatgtttattatctaatcattccaagttttgcattgatatctgactgccactcctttctttcaaggacagtgttttttgtagtaaaatcactggtttatacaaagctttatttagggggtaaagttaagctgctaaaaccccatgttggctgctgctgttgagatactgtgctttgggagtaaaaaaagaaagttatttctttgtcttaaagaatttttaaaaaattagtcatgagacttattcatntttccagggaacatactgattggtcttaaaagactagacagttaagtaaaaggtggctggaacatctat

SEQ ID NO: 1333 - DNA, 495 bp, Homo sapiens
  misc_feature 16: n = A,T,C or G
accctcatcattgctnttctagccattcatgccccctcttcctctggcacattttctaagagtttatttcataagcagcaaacggactgttgtcgatttcatctctcctgacctacctggtggaggtgctaatggccatggacagaaaggggcgagccagagctcgtggctttgtggaggcagaggcctgcattcagcagcggccctgtgtgcctgtaagttaggaaggctttctgacaggtaagaaaatgagataggttgatgacttaccatgcttttatatttggcagtttacaattctagacttttcctactatggcgatctttttttacttaattctttggaggtaacaatattttggagtcttaagaatttgattttataccaataagaaataaaaattagggatctttcctgtagtatatagttttactattttaaagagatctctgaattttactagagaaccaacattccttaatggcagaactttg

SEQ ID NO: 1334 - DNA, 239 bp, Homo sapiens
actaattatggggggagcaggtgaagtagctgttgggaaagaaggtgtatttgctgtggtgctagcagtttcagggaaattagtttcagtggtatcagctgcagctactgtaggaccactagtcgcagtttctgtggttgctacagcatcagctgagttgccttggttggtggctgtgtttacagaaaggagagcaagaagagtaagatgaatgatggctttcattttagctgttcttg

SEQ ID NO: 1335 - DNA, 457 bp, Homo sapiens
  misc_feature 17, 19, 140: n = A,T,C or G
actttaatatttatgcngntgttttcttgtttcttttttactcactgcagtatgaggaacaaatcacaaacacttactttggagaaacagagaccgtagtgtagattttacaaaatcactttttaaaatctctgtattgngctcctcaaatacctagagccagtctttgcataaaatatcacagctttatctataaccttaaaattctgcagcagcctaaagatatggataagatataccaccacttgctattctgaaatatatctattaccatatccaacctaatgatagtatctaaaaaattctttcttccataggaagtctctgacaagctgttattcatttccttgacgttaaaagaatctggggccaacatttgtattttatcagaaaaaaataaaaaaaaagtttacctaccatgttcatattaagaacaatgtctatacaagtcagttgt

SEQ ID NO: 1336 - DNA, 387 bp, Homo sapiens
  misc_feature 13, 14: n = A,T,C or G
actcacaagtaannaactttctctactgaaggatactgtcacagagtttgttgcagagcatctatatatatatttatttatttattttaaaaaataaacaacaatgatgaacgaacccaggttcctagaaccaattctcttgattctctacttccacaaaataaagtgtatcatttggccaagactacagatgtgtttttttttttcacagatgcaagtgccatgcaaaaataaattaaagaacagataccaaaacatacatgtgataaaactacagaaggtagatttttaaaagcatttatataaacataatttataatacttctcttttttcctttatatacagtcacaaagctgtagttatacatctaggatttcctctgctgt

SEQ ID NO: 1337 - DNA, 390 bp, Homo sapiens
acctgacatcttttcctgcattctctaccaggaaataaagatgaaattaaatatcaaaattctaatcgatgatatcagtgcaatgttcaggaactattcattaagatattagaaaaccattcaaagtggtaggacatcagagcctacttcttacattgctgtgggagaaatgcaggtttcaaatttaatatatatatataatttttttaaaagcagaagtttctttttatatttggtaaacttaagttccataaagccagacgctatacagtgcaaaggctaatgtggcaatagctctaaagacacagttgctgctcaggttttatgtatagataatagaaagcacagtttactaacacagtaaaccaacagagttcaagtcagatgagt

SEQ ID NO: 1338 - DNA, 363 bp, Homo sapiens
acagatctttaatagaaaagtatatctctttacagtagaaaaatatctgaacagtcaacttttcttaagacaaaaattcaaatgtaacatactacctaaactataaatttagctaaaactgaatcgagctgtttataagaactgattccaaaatatacatatatgaatttacataaccgatatgtagaagctcttcaaaatcgactgtaaattgaaaagttaaaattggccttgcctctgcagtttggagctgcaatggctgccagtatcggctgttttcttggtgcctgagctgcagggtgggcctgtcgaggaggggctgctgtctgggtcgctttccctctggctgtctgtggcgtaggt

SEQ ID NO: 1339 - DNA, 278 bp, Homo sapiens
acttgctggtctcaaatttccacaaggagatatcaatggtgataccacgttcacgctcagctttcagtttatccaagacccaggcatacttgaaggagccctttcccatctcagcagcctccttctcaaatttttcaatggttcttttgtcgatgccaccgcatttatagatcagatggccagtagtggtggacttgcccgaatctacgtgtccaatgacgacaatgttgatatgagtcttttcctttcccattttggcttttaggggtagttttcac

SEQ ID NO: 1340 - DNA, 333 bp, Homo sapiens
  misc_feature 8, 11, 187: n = A,T,C or G
aaagaggntgnatcaagtttaaatgactgtgctgcccctttcacatcaaagaactactgacaacgaaggccgcgcctgcctttcccatctgtctatctatctggctggcagggaaggaaagaacttgcatgttggtgaaggaagaagtggggtggaagaagtggggtgggacgacagtgaaatctanagtaaaaccaagctggcccaaggtgtcctgcaggctgtaatgcagtttaatcagagtgccattttttttttgttcaaatgattttaattattggaatgcacaatttttttaatatgcaaataaaaagtttaaaaagttaaaaaaaa

SEQ ID NO: 1341 - DNA, 387 bp, Homo sapiens
  misc_feature 13, 30, 68: n = A,T,C or G
accctctgtcaanagaggagatgttgcctncaacagcagggaggaatgagacctgggtggcttcccanaagtcagtgtttccggcatgactggctcctttcctggcaaacactacaatgtgtcacactacagctagcaattcctccccactccctcccagcccttcctccctccaccccacaaccctatagccatttgaggcaaatggctttctaaaggcccagggatagatgtgccaggcttgcctcttaatggggtcaaagtgagttttgctttggaaaaattcaaacaggaatgtaaaatggtttgagctctttctagtccaaccaaaggtgattacatccagcccctctcaagggaatgggggcagagactgtcgctcctgaa

SEQ ID NO: 1342 - DNA, 241 bp, Homo sapiens
actgtgccttgacctcagcaatgatgctgtccatgtccagggagcggctgttgtccatggacagcaccacagatgtgtccgagatctgggactgcagctcccggatctcctcttcatacagctgcctgaggaagttgatctcgtcggtcagcccttccaggcgagactccagctctaccttgttcatgtaagcttcatccacatccttcttgatgaggacaaattcgttctccatctctgt

SEQ ID NO: 1343 - DNA, 347 bp, Homo sapiens
  misc_feature 14, 17, 195, 196: n = A,T,C or G
accgcaagggtggnttngatgaagtctgactactttttttcaaacaaactattatattaaaactgtcatattttggctaagtttggacctataactacactttcattgtttgcatctctctatgaagatacgtctgtccaaacttttaaaaggcataactgtattttatgtgtttattctttatatagatagtannttatattttattctcacccgaagtattcacacaatcttttttaaaaaaaatttgaaatggcattttgtattgccacagaggtaggatgagccatatattagtgaaatgttttattttgtaaaatataaatggattatttgccatcattagt

SEQ ID NO: 1344 - DNA, 186 bp, Homo sapiens
  misc_feature 13, 16: n = A,T,C or G
actgaaggatttntcntctgttcacacgcaggcgttcaagctcaaaagcctaacccctagcactcccacataactgctgaaccctgcacatgggaacagtccagtgtgtccccaagatgtggccgcagacctagacagctgcagtcctctactgctatctgaaggttcctgacagctctgcatagt

SEQ ID NO: 1345 - DNA, 110 bp, Homo sapiens
  misc_feature 15, 52: n = A,T,C or G
gcaatcccggctttncccattcagccagggggatgcggcggccataggtcangaggctgcgtccgatgtcctcacacacaggagtagtgccatctagatgagataccagg

SEQ ID NO: 1346 - DNA, 414 bp, Homo sapiens
  misc_feature 13, 14, 16, 26, 32, 213, 214, 346, 355, 375, 376, 392: n = A,T,C or G
tactgcatctacnncnaccgcaaaanacgaantgaccccaacttcaagaacaggcttcgagaacgaagaaagaaacagaagcttgccaaggagagagctgggctttccaagttacctgaccttaaagatgctgaagctgttcagaagttcttccttgaagaaatacagcttggtgaagagttactagctcaaggtgaatatgagaagggcgtnnaccatctgacaaatgcaattgctgtgtgtggacagccacagcagttactgcaggtcttacagcaaactcttccaccaccagtgttccagatgcttctgactaagctcccaacaattagtcatgagaattgtnagtgctcanagcttggctgaagatgatgnngaatgagaaacaaatntcaacataataaaatctcagtt

SEQ ID NO: 1347 - DNA, 324 bp, Homo sapiens; identical to SEQ ID NO: 613

SEQ ID NO: 1348 - DNA, 433 bp, Homo sapiens
  misc_feature 15, 127: n = A,T,C or G
ccaatattggggcanatctaaaaggcagaagttgatgaagagaagcctcattaccccctagatgcattttgtatatgcttcatgttatataaattctccagtggtgtttgagagaaaatggctaagnagcattaccataaattgaaaataaatttttagtatttttacatccatcaaaggcaaatcatctctttcagtgttttcttattgtctgatcactaaataattcctgcctttggtccctagaccaaagagcttcacacattccaaagagaagctggatattgacatttataaccacagacaaatggatagggaaatagcttgggaaaacaagaaggatgaagatggcagcatttataatttcaggggaaccgtccatagatcacatattaagcattttgtagagtctctaccatgtgttcggaaatgt

SEQ ID NO: 1349 - DNA, 415 bp, Homo sapiens
acatgcagatgacttgagagaaggtgcacagtatttgatgcaggctgctggtcttggtcgtatgaagccaaacacacttgtccttggatttaagaaagattggttgcaagcagatatgagggatgtggatatgtatataaacttatttcatgatgcttttgacatacaatatggagtagtggttattcgcctaaaagaaggtctggatatatctcatcttcaaggacaagaagaattattgtcatcacaagagaaatctcctggcaccaaggatgtggtagtaagtgtggaatatagtaaaaagtccgatttagatacttccaaaccactcagtgaaaaaccaattacacacaaagaatccaaaggccctattgtgcctttaaatgtagctgaccaaaagcttcttgaagctagt

SEQ ID NO: 1350 - DNA, 202 bp, Homo sapiens
  misc_feature 10: n = A,T,C or G
ctgcaattgnaacaacagaaaaatgctggcaccagaacgaatgagggtcctctcatcgttactgaagagcttcactcccttagttttgaaacccaattgtgccagcctggtttggtaattgacctcgagacgacctctctgcccgttgtggtgatctccaacgtcagccagctcccgagcggttgggcctccatcctttggt

SEQ ID NO: 1351 - DNA, 232 bp, Homo sapiens
  misc_feature 12, 14: n = A,T,C or G
accagcaactcncnaggtttctgccagcccactgttgtatacgcttattgagaaaacaatgcaaaatgtgaagcatccggttactgggcaatttctatatcaggacagcaactgggccagcaaagttgagaaactcactttagacaatgctgctttccctttccttgcatattctggaatcccagcagtttctttctgtttttgcgaggacacagattatccttatttgggt

SEQ ID NO: 1352 - DNA, 343 bp, Homo sapiens
  misc_feature 14, 15: n = A,T,C or G
acaaccagaaaatnntgtgggatattgaattatgggaggctctgactgtctcgggtgtcagcttaacattccacagatggggggttagtttttatatcctataatacaaagcatattaaatggcaatatggagtcagtcctgcatttaatgtcttgaacattttaaattacttctattaccatgttgttttttagtagaattgtttcctaaagaaaaccactctttgatcatggctctctctgccagaattgtgtgcactctgtaacatctttgtggtagtcctgttttcctaataactttgttactgtgctgtgaaagattacagatttgaacatgtagtgt

SEQ ID NO: 1353 - DNA, 579 bp, Homo sapiens
  misc_feature 544, 548, 549: n = A,T,C or G
acaaagataaatgtttcttcacaaaacggccaaatcagtaacacaggctttgtgttcaaagtattgattagtgcatacttcactaataaagaatctatagtatgtattttattagtattctagaaaatttcagacaatcagcaaatggaatgaattttattatcaatatgccatagaaattcagtcatctaatttttctagcttatgttatgttgagcctgcatgtggtctctctacctggaggagggacaggataagaccagcagtatcccatatgattccaaatggaagtccaataatgtattggaatttgctacatctcatatccaaacagtgctttatctacattaatggatgagtttgtgattttaatatggaaacaaatgagtgattcgagttgttcaaaatataatttttgaatatacttttgtgattgatagttatgcctcaatcactatgaaactcagagtattattaaaaagaaccttcccctctttcttagcactaaattcaggctcttgtagatctttcccaagctctgctntgannatcaggtggtgctgtggcattaaagttgca

SEQ ID NO: 1354 - DNA, 358 bp, Homo sapiens
  misc_feature 16: n = A,T,C or G
acctagaatatcaacngagtcttttaaatgaaagtgatggaaaatcaagatggttctactcaccgtggttgttggtagaatgttacatgtatcgaagaattcatgaagcaattatccagagtccaccaatcgattactttgatgtatttaaagaatcaaaagagcaaaatttctatgggtcacaggaatccatcattgctttatgtactcacctgcaacaattgataagaactattgaagacctagatgaaaatcagctgaaagatgagttttttaaacttctgcagatttcactgtggggaaataagtgtgatctgtctctctcaggtggagaaagtagttctcagaataccaatgt

SEQ ID NO: 1355 - DNA, 303 bp, Homo sapiens
accaggagctgctacagagcgccagcgcaagcccaatggacattgcagtgcaggagggaaggctgacatggctggtttacattattggagcagtgatcggtggccgggtttcttttgccagcactgatgagcaagacgccatggatggtgagcttgtctgtcgggtgctccagctgatgaacctaacagattctcgtttggcccaggcgggtaatgagaagctagagttggccatgctgagcttttttgaacagtttcgtaagatctacattggggaccaagtgcagaaatcctctaagctgt

SEQ ID NO: 1356 - DNA, 394 bp, Homo sapiens
  misc_feature 12, 14, 15: n = A,T,C or G
acgtgtggtcangnngaagtctgttctgaaggtgctgggagaatatcctctcattgtctgtaaacgctcccttcatctcattaaagacgactcctttaaagaccaagggcgtctgggggtcgctcggattctcatgttccagccgccatccttcctgccagaaatccagctcgcgtaaacatgggaaaaaggtggcatccaaatacaccgagaggagattctgaaagtccttgggattttgtgtggaaaatggatacagagtataatcactagctgtgaaggcgttcatgaacgtggagagggaccggctcaacattttgaagaaagggtctctgcacggatatttctgagacccacaaaggacggtatgctcaagaatgtgaggaacaccagt

SEQ ID NO: 1357 - DNA, 311 bp, Homo sapiens
  misc_feature 12, 13: n = A,T,C or G
gtggtggcgcgnncctgtaatcccagctactctggaggctgggatgggagaatcactggaacctgggaggctgaggctccagtgagccgagattgcatcactgcactgcactccagcctgggtgacagagggagaccctgtctccaaaaaaaaaaaaaaacaagcttttacaaatgttattagtgtccttttttatttctaatgccttgtcctcttaaaagttattttatttgttattattatttgttcttgactgttaattgtgaatggtaatgcaataaagtgcctttgttagatggtgaaaaaaaaaa

SEQ ID NO: 1358 - DNA, 595 bp, Homo sapiens
acttgatgataacggttttaaaatccttcactcgttctttctcaaatcttcccacttcttttcgaatcgttttagatatctgttcaaaatctctttccccttgttgcactttcgcctcccactctcttatttcatttttagcttgctgtattttatctggtttgttagcaaccatcatttttgcttcagcttcacgttttttgagcaaagtaatttgagcatcttcccatttctgccagcacttcattcgatggtcaaacacacctttcactgcagcaataagacgaatgtagtcactaagtagttctgaaaacatataaaagtcagcaaaagcttgttcttgatgtaactggtctatcttctcctcaacctctgcaagctgagacaaagctctagataaagcagtatgatcctcagaattacctaacatggcagcacttttagcaaaggcagctgtgttggctgaaagttctgaaatttaaaaaaaagtatgcaattttagtgttcactcataaaattttaaaatattgtattgatttttccacttttctctaaattttacttatgcacaagttgctcaaataatattttaaat

SEQ ID NO: 1359 - DNA, 391 bp, Homo sapiens
accctgtgccagaaaattggctccacaaggaggctcaccagctcttcttggaacctgaggtgctggacccagagtctgtggagctgaagtggagcgagccaaatgaagaagagctgatcaagttcatgtgtggtgaaaagcagttctctgaggagcgaatccgcagtggggtcaagaggctgagtaagagccgccaaggcagcacccagggccgcctggatgatttcttcaaggtgaccggctcactctcttcagctaagcgcaaggagccagaacccaagggatccactaagaagaaggcaaagactggggcagcagggaagtttaaaaggggaaaataaatgtgtttccccattatacctccttcaccccagaatatttgccgtcttgt

SEQ ID NO: 1360 - DNA, 257 bp, Homo sapiens
  misc_feature 10, 151: n = A,T,C or G
actatagggnaaatacgggccctatttcaaagatttttaggggaattaattctaggacgatgggcatgaaactgtggtttgctccacagatttcagagcattgaccgtagtatacccccggtcgtgtagcggtgaaagtggtttggtttanacgtccgggaattgcatctgtttttaagcctaatgtggggacagctcatgagtgcaagacgtcttgtgatgtaattattatacgaatgggggcttcaatcgggagt

SEQ ID NO: 1361 - DNA, 274 bp, Homo sapiens
  misc_feature 10, 11, 22, 24, 72, 181, 182, 228, 229, 244, 245: n = A,T,C or G
catgggttcnntccatttttgntntttgtgtttttaattaaaagaaaggttacctcagttttcactccttanacatggatgtagctacctttttttgtatgtcttttttttttaagcaatcgtgttgaattaggagtatacttggtgtggaaagagtatgaatttgccatgtgatttgcanntggggggaagctactgtgagcgtgtgtttttttaatttacactatnnagtgatttttttttnncccaacgtcaagttttttaccttgcatgt

SEQ ID NO: 1362 - DNA, 334 bp, Homo sapiens
  misc_feature 10, 13: n = A,T,C or G
actcaatatnatncaaacctcaaataattgacttgattttacacaacatccttcccttttctacaagttaatttttttacaaatcatttgggttatctcctaaataggttatattttattgcttctagaaacaatgtttcaaaatatatgtgcattatcagtaataatttgtataaatatttcccacaacaattttcataattttcaaagactaatttcttgactgaagatattttgctagggaagtgaaactttaaaattttgtagattttaaaaaatattgttgaatggtgtcatgcaaaggatttatatagtgtgctcccactaactgtgt

SEQ ID NO: 1363 - DNA, 585 bp, Homo sapiens
acacttgaaaccaaatttctaaaacttgtttttcttaaaaaatagttgttgtaacattaaaccataacctaatcagtgtgttcactatgcttccacactagccagtcttctcacacttcttctggtttcaagtctcaaggcctgacagacagaagggcttggagattttttttctttacaattcagtcttcagcaacttgagagctttcttcatgttgtcaagcaacagagctgtatctgcaggttcgtaagcatagagacgatttgaatatcttccagtgatatcggctctaactgtcagagatgggtcaacaaacataatcctggggacatactggccatcaggagaagggtgtttgtcagttgtttcataaaccagattgaggaggacaaactgctctgccaatttctggatttctttattttcagcaaacactttctttaaagcttgactgtgtgggcactcatccaagtgatgaataatcatcaagagtttgttgcttgtcttggatttatacagagcttcttcatatgtctgagtccagatgagttggtcaccccaacctctggagagggtctggggca

SEQ ID NO: 1364 - DNA, 138 bp, Homo sapiens
  misc_feature 15, 26, 44, 45, 76, 77, 96, 97, 127: n = A,T,C or G
caaaaagctgcattngaggatagcantggcagctccgagttacnngaaattatgagaagacgacaggaaaaaatcnntgctgccgctagtgattcnngagtggaatcttttgatgaaggaagcagtnactaatttgtt

SEQ ID NO: 1365 - DNA, 270 bp, Homo sapiens
  misc_feature 16, 238, 255: n = A,T,C or G
actctctctgaaacanctacaaacatcttgtttttgcaaaatatacaatgtttctcaatctttctgtccttatctcaatttgcaaaaatattttgaaacaatctcctttaaatgttattcttgttaatgagggcaaatcttttaaaatccacatgctagatcttgaaaacgcttgagaagaaaataaactgtgaaaggagtggttatttaaatacttcaaactgcacatgtgaaacanacccactatttaatcanaattctatgcaagtt

SEQ ID NO: 1366 - DNA, 182 bp, Homo sapiens
  misc_feature 14, 15: n = A,T,C or G
acttaaattctttnngatatatgctttaggtgatgggtgttcacaatgcaaaaatcctctttgctctactaaaaaatttcccaaaggattaattcacagggtgaaaatagtggtggatctgaaaaaattagctacaagttaaagttcttgtggagctagcaatcactccaacccacactaag

SEQ ID NO: 1367 - DNA, 187 bp, Homo sapiens
  misc_feature 17: n = A,T,C or G
actcaaccatcttaggncatcagattggactttcaggcagggaagcccacgaggagataaacatcaccttcaccctgcctacagcgtggagctcagatgactgcgccctccacggtcactgtgagcaggtggtattcacagcctgcatgaccctcacggccagccctggggtgttccccgtcactgt

SEQ ID NO: 1368 - DNA, 160 bp, Homo sapiens
  misc_feature 12, 27, 99: n = A,T,C or G
actaggattacnggcacaagccactgnacccagcctaaatctcttaaccaattacctcctccactaccatctcattctatgaggccagcactccctganactaaagccaaagacacctattaaaaacccaaagcttacagaccaatatcatatcccttat

SEQ ID NO: 1369 - DNA, 416 bp, Homo sapiens
acttctacacaaggcctcttagtgacgtcaatcaattggaggtaggagtttatcaatgaattgcttgacatccatcatttcctgttgacacgaactgtgcatcataccttcataggttttaaaggtcacattggctggattcaccaatgtttttagtttttccaccgtaagagaaccaaacatcaggggaaccaaagggtcacaatccccgtggcactggagaatagaaatatctctattagcaccaccgataggaccctgtggaaaggaagcccgaagtggaagccagcaactgagtgcagtgacacctgccagtttctgctgtgtggtaagggcagtatataaagataaagctcctccctgagaaaaccctcccaaaataattctgttagaaggaatgccattcttcacttctt

SEQ ID NO: 1370 - DNA, 553 bp, Homo sapiens
  misc_feature 256, 470, 494, 502, 506, 530: n = A,T,C or G
agtttgagttcttctttgtggaaacttaagatgtggtgtaaatgattctttccaaaattgtccagcagcttgaatgaggcagtgacaattctgaggtggtttattgggagtccttctacatttctcttagataactctgcactctgggtggctattgtgtagccttactgccccagagtgcctgttagccaaatatttcccctctgataggaatattttctaagaatcagctgataacttgcgtgctggaccttgntatctgtgcccctgggagacacacgttttcttggttttgaaaacctgaaacacaggcaactttacattttggggaattagctgatgcctcctgaagcctgaggaggtggcggggaatatgagcggtgctgtctctctcaaaagtgccctttagatgattccccctcctagggctgcctgcaggggctgtaggcttgggaaagattgtgtaggtnacagtgaatcagaatgaagtggtngattttgngtangatgcatttgtctgctgtaatttnttatatatatattaaacttactg

SEQ ID NO: 1371 - DNA, 292 bp, Homo sapiens
  misc_feature 13, 14, 208, 218: n = A,T,C or G
acacagcaggtcnntcagtgccttatagaggaggccgttcagggccctcaggcgcgcatggtcttccttcctggttttctttgaggtgctcctcatgaggaattccaacttggatggtttgtaagtcgagtgagaacccaaggaaggactttcataccaaaccttttttttggttttcgaggcaaatttcttgagccagttcttgcangagacagcanagcagtgaagtccccgctcgcagcctggaaatagcgcagcatcgcggctacggaacagggcccggagacccgcg

SEQ ID NO: 1372 - DNA, 133 bp, Homo sapiens
  misc_feature 15, 16: n = A,T,C or G
gaaagggagccagannactgattggagggccctatcttgtgagtggggcatctgttggactttccacctggtcatatactctgcagctgttagaatgtgcaagcacttggggacagcatgagcttgctgttgt

SEQ ID NO: 1373 - DNA, 441 bp, Homo sapiens
  misc_feature 18, 342, 343, 412, 432: n = A,T,C or G
acctattaggaaaaccanatattgcaaatggtcaattcgattttaatttctcaaaagatactctgttatccagaagattaaaatgcctacattgagtgcttaaaaaaaaaaacaactgtgatgatgtgagcagaatggcaagtaagttaagcatttttgatcctgtaatcatggtatcattacaatgaaaggaattcacaaactactgccagaggaagtttgtttttttaatttaagagggaaatataacctataaatttgtttcttccaagcttagctcttaaatttggagactcaaagttaaacatcctcaacagagttttatttataattttgaattgnnaatttgtattttgctactgatctgtgatcaaccattttaacttttcatctctagggatgtttaacattnataattgcaaaataaaccanctataaaaa

SEQ ID NO: 1374 - DNA, 375 bp, Homo sapiens
accaatcaggttgctgtgagaaaactgacaaaatatgcaataaagaataccaagagagaaaggacaatcgccaattcagtttcccagaacagaatttttatgaactgcacaaatgtttaatgtaaatggtgatacctacagggaagaaatagaagagttgataatatatcactgggacggggtgggggaaagacttgaaatttttggtgcctaacactaatggtccatatgtagttaaacccatgagtatggtatatgaatgtcttttttaaatgttaaaatgtgttgtctatttaatgttaattaaaatgcagatcaaagcaccaccatttgctttttccacagatcattaacatttccttaaagtatgtaagt

SEQ ID NO: 1375 - DNA, 532 bp, Homo sapiens
  misc_feature 526: n = A,T,C or G
actgagaacaatttaactctgaacacaaaagtttagtgaatttgctactgttccattacaggacaattaaaaatgagactatatcaacttcactagaatttaattgctaaagctaccttatgcacatctattaaactaaaagaaacgactttaaccccttcagttgtttttaagacagcactcctttacagggagtcaggtttggtaaatataaaggatacataaaaaatacagtataaactgcataagcttaacagtagcaaaaacactgatgaacttttaaaaagtcaaaaatatataaaaatattagcctgaaatggcaaattttcaaacaccgatctgtgtaaaaatgtttaaatattgatgttactccaaaaatatatacttattctattttttttctatttgcaacagtttataaaggcaaacaaacacctgcaattgaggtagcaaaagccaaattcacaaactttggatcaagaaaaatacccttcctatgttttaacagcatcttctatacaatagngaatga

SEQ ID NO: 1376 - DNA, 263 bp, Homo sapiens
accaaaaatacatttcttaaggttaaaagcatgcacttccatgcatacttgcttttggggagagtggggagaagacattctaataatcagtttgtgaaatagcttctgttggaaaccttttgaggggaataaggaatggtcatctaaaatgagagattctggattttaatgcagttcaaagttgagctgtatttttgttgttgatttatctggattttttttaaagccttctaaaacccagtgaattcaataccttaattagt

SEQ ID NO: 1377 - DNA, 366 bp, Homo sapiens
  misc_feature 14, 15, 16, 274, 321: n = A,T,C or G
acttttgaaaatannnctgcttatttgtaaactctgtaattaggaccttttgctatttgagttatattcctttctaacttcaaacgtctgcattcatgtataatagccattttatgcacagatgaggtgattcccacacttcttttcgcagatgtttcattatctggatgagtgtattacataataaatttgaataatggtagtcttccaaacgacaaaaagcaagctagttgatttgtcaattttgagtttaaatgttttgactgcttatcangcaaaaaaaatcaaaggaatagcatactaatattaatggaaatgcanagtatatttaattggcatgattttttcatggatgtgtgcttcatt

SEQ ID NO: 1378 - DNA, 309 bp, Homo sapiens
acaaaagtatgtcttttaaaatggaagtaacgtttgtttagctagtgaatgtgacaatatattttatgtatataatgagtctaatgtaattttgatcaacttggtaatgatgttattaaatagcaaaacaagtgcagtgtattaaagctaaacactacattgaaacgcaaacaaaattctggtgaaataactgggctgttgatgcaggtcaggtggaagctgagaaataaatgtatataaatatgtagctgaggatattaattcccattatataaccataattctgtgacttgtaataaaccaagctgt

SEQ ID NO: 1379 - DNA, 186 bp, Homo sapiens
  misc_feature 49, 75, 86, 96, 103, 112, 123, 127, 137, 141, 170, 174: n = A,T,C or G
caagcttttttttttttttttttttttttttttttttttttttagggcncccgctcataaggggatggccatggntaggtttatanatagttgggnggttggngtaaatgantgaggcaggantccnaggaggttanttgnggcaataaaaatgattaaggatactagtntaanaaatcaggttcg

SEQ ID NO: 1380 - DNA, 278 bp, Homo sapiens
  misc_feature 208: n = A,T,C or G
ctccccccgagcgccgctccggctgcaccgcgctcgctccgagtttcaggctcgtgctaagctagcgccgtcgtcgtctcccttcagtcgccatcatgattatctaccgggacctcatcagccacgatgagatgttctccgacatctacaagatccgggagatcgcggacgggttgtgcctggaggtggaggggaagatggtcagtangacagaaggtaacattgatgactcgctcattggtggaaatgcctccgctgaaggccccgagggcgaaggt

SEQ ID NO: 1381 - DNA, 237 bp, Homo sapiens
actatagcataacctgcctttgctggtgtgtggcgattaggcctggtggaacttccatcaataaatcaagcgtgatcagggtgaggaacaggaaagaaggaaatatggggtgaatatcaggtggatcagagagatacagtcatggaggtcaggtgtggtatcaggaataatgtgggaggccagattgaagtccaggccaggaacaatggtaattgtgggacttaagaaagtgtgagt

SEQ ID NO: 1382 - DNA, 257 bp, Homo sapiens
  misc_feature 17, 18: n = A,T,C or G
actatagggtaaatacnngccctatttcaaagatttttaggggaattaattctaggacgatgggcatgaaactgtggtttgctccacagatttcagagcattgaccgtagtatacccccggtcgtgtagcggtgaaagtggtttggtttagacgtccgggaattgcatctgtttttaagcctaatgtggggacagctcatgagtgcaagacgtcttgtgatgtaattattatacgaatgggggcttcaatcgggagt

SEQ ID NO: 1383 - DNA, 565 bp, Homo sapiens
  misc_feature 547: n = A,T,C or G
ggaaatttacctggcagcaagagacagccacagactcctaaggaaaaggctgaggctctagaggacctggttggcttcaaagaactcttccagacaccaggtcacactgaggaatcaatgactgatgacaaaatcacagaagtatcctgtaaatctccacagccagggtcattcaaaacctcaagaagctccaagcaaaggctcaagatacccctggtgaaagtggacatgaaagaagagcccctagcagtcagcaagctcacacggacatcaggggagactacgcaaacacacacagagccaacaggagatagtaagagcatcaaagcgtttaaggagtctccaaagcagatcctggacccagcagcaagtgtaactggtagcaggaggcagctgagaactcgtaaggaaaaggcccgtgctctagaagacctggttgacttcaaagagctcttctcagcaccaggtcacactgaagagtcaatgactattgacaaaaacacaaaattccctgcaaatctcccccaccagaactaacagacactgncacgagcacaaagagatg

SEQ ID NO: 1384 - DNA, 222 bp, Homo sapiens; identical to SEQ ID NO: 1253

SEQ ID NO: 1385 - DNA, 530 bp, Homo sapiens
  misc_feature 514: n = A,T,C or G
gtttctcatcaatctttcacctgatggttttagcagctattgataattgttgcctggatccattatttcatttcaggggttgtaaaatagtgattttctggttctatcaaacctcttgcatttatcatctatgattcttctttaaggaactttctctaaatctgaatgggaaagatgcgataaatatttatcaaattttagagtgagttagtgccctagcaacctccaaagttgacaaatgagtatttctttaaagcaaggtatggcccaaccaatactatgaaactagcatgtttagaatagagcaggaggaaactatatttgaaaggtcagaagtggaaagactaagagggcctgaacaataagaggacagaaccaagaggagttggcaactaattggatgtggggattaaggaaaggtaagcatcaaagattacctccaagtttgttagaaggttagtagcaggattctgatgccattcaagtaaatacaggtctcagtcagatgggcccnaggagccacatgtatt

SEQ ID NO: 1386 - DNA, 496 bp, Homo sapiens
agaagctctatataaatccaagacaagcaacaaacccttgatgattattcatcacttggatgagtgcccacacagtcaagctttaaagaaagtgtttgctgaaaataaagaaatccagaaattggcagagcagtttgtcctcctcaatctggtttatgaaacaactgacaaacacctttctcctgatggccagtatgtccccaggattatgtttgttgacccatctctgacagttagagccgatatcactggaagatattcaaatcgtctctatgcttacgaacctgcagatacagctctgttgtttgacaacatgaagaaagctctcaagttgctgaagactgaattgtaaagaaaaaaaatctccaagcccttctgtctgtcaggccttgagacttgaaaaccagaagaagtgtgagaagactggctagtgtggaagcatagtgaacacactgattaggttatggtttaatgttacaacaactattttttaaga

SEQ ID NO: 1387 - DNA, 293 bp, Homo sapiens
gtgtcttcaatggtttgttagttgccattacaactttgtctgggtagagtttttgagtttttgcagttcagtatccctctgtctattcacacttcgtgttagtggtaactcagtttgtctttaaatagttacagaagggatacgtcatttgttaatgcttttgtgaagtgagttaaacgagctttctgtattttaatgctttagtgtttcagttttataagtgaagattttattttaaaaaccagtgggaaagagtggggggtttctttttatgtctgggtcattcaggcagt

SEQ ID NO: 1388 - DNA, 497 bp, Homo sapiens
  misc_feature 180, 181: n = A,T,C or G
acaaaaaagcaccagcaactgataaaaattgcttttttgtgcgctacccaactggttaaagccaatgtgatcttttatggtgaaactcctaagaaacaggtggttttgctggaaacttggtagacccttaattatagtggtgctaatgagcactactgtaatataaagccaccattattnnttatcaaacatctgaatacattttacaaaggctattgtgagggcattattttgagcatctattttgaggtgatgtttaaaaaaactttaacatcaaatcaaattgtaaattaatttaaatatattgccttaaggacctactaaagaatgtgccaccagactttaagtgatagttgcaatatccttgtctaaaaaaaaaaaaaaagttgacttaaacattttctttaacagttgtcttttttttctaaattcagtctttctcttgcttttttttccctgctattgaggaagtattttgccttccctactcactgaga

SEQ ID NO: 1389 - DNA, 241 bp, Homo sapiens
  misc_feature 15, 133, 207: n = A,T,C or G
acccactattattgngtttgttttatgccattattgattcttgatattcaagcatttacaatgtagcatatttgattttcttttttctttctttttttggcatcattaacatttcatttgaaatgcatattgntcttgaagtactttgtttttagcataaatgttgtgcattttatcttagtgtttggatgaaaacatttgtgttgnttagctttcatttgctttgtatatttaataatgt

SEQ ID NO: 1390 - DNA, 162 bp, Homo sapiens; identical to SEQ ID NO: 1230

SEQ ID NO: 1391 - DNA, 506 bp, Homo sapiens
accatggtaagaaacagttttaacagtagatcacgtatcagattgaatgataataaatttattgggaaatgagttagatttggacagtctgccatttttcaaaatcacagttgaaagacaatcaatcataggttgactgtaggagttgagcaaaaagcaattaagtatccttttaaaaaagcattttagttctttcctgagcaactaagtatactgtgagaatcaactggctatatgggatttacaataaagtatttgtatcttattatttgttaattgtgttatatgttcttgctatcagcaaaatttataacaaacatgtatagttgaatacataattttctcccagaagagtgaactgctaaacatttaccagcacaccactggattgggagaatggggagaaagggggaaatattttttaaaccaaagaaggaagtctgatgttttttcatttggtttttcagtttgccttcagcatccaactgccacagtgtgctttaagt

SEQ ID NO: 1392 - DNA, 270 bp, Homo sapiens
actactgcagctgaccaatccaaagccagtttacactcagcatgtgttattctactttaaaatataaccttagtgaaagcacccttcaaatcaacagcaatctcacagtgagtttcctctgggtagtcaggatttgtccagaactacatccttttcagatgttcagagttttgcttgccattagggaggcaagggaaggatgagcaataaatcaggtttctcgttcgtatcttacttcttacctaattttctccctgttgcttatttggt

SEQ ID NO: 1393 - DNA, 157 bp, Homo sapiens
acgtccatcttccagctgcttgccagcaaagatcagtctctgctgatcaggaggaattccttccttatcctggatcttggcctttacattttctatcgtatccgagggttcaacctcgagggtgatggtcttccccgtaagggttttcacgaaaatc

SEQ ID NO: 1394 - DNA, 331 bp, Homo sapiens
actttggcctctctgggatagaagttattcagcaggcacacaacagaggcagttccagatttcaactgctcatcagatggcgggaagatgaagacagatggtgcagccacagttcgtttgatctccagcttggtcccctggccaaaagttcgaggggtttgtagagcttgcatgcagtaataaattccaacatcctcagtctccactctgctgattttcagtgtaaaatctgtgcctgatccactgccactgaacctgtcagggaccccggaggcccgaaaagaacccaaatagatcaggagctgtggagactgccctggcttctgcaggt

SEQ ID NO: 1395 - DNA, 534 bp, Homo sapiens
acagtgtgatgttttgatacatgtatacattgcgtaataaccgaaccagggtaattagcatatccatcacctcaaatatgtgtcatttctttgtgttgagaactttcaaaatcctctcttctagctatttcaaaatatatgcaataggttattgttaactctagtcaccctactatgcaataaaacattagcacttatttaatgtgaagtttttaatacaaaaattattttaagaaaataagcacaggctgggcgccgtggctcacgcctgtaatcccagcactttgggaggccgaggcgggtggatcacctgaggtcagaggttctagacgagcctaaccaacatggggaaaccccgtctctactgaaaatacaaatttagccaggggtggtggtgggcacctgtaatcccagctacttgggaggctgaggcaggagaattgcttgaatctgagaggtggaggttgcagtgaaccgagatcgtgccattgcactccagcctggggaacaagagcaaaacttcatctcaaaaaa

SEQ ID NO: 1396 - DNA, 358 bp, Homo sapiens
  misc_feature 259, 349: n = A,T,C or G
accattcagttcagctgcaggtataggcagtgacaagtatctaattcttagaagaatcacttactcccacaatctgtccagacacattaatctaaggacaagtttataaatagcaaacgtgattttcacattgcagtgttctcaagaatgtatatacaagtgtgtagtcctgttgatgggatgtttccccgagttctttctattgatgcgttcatgctcttgaccctggtagagacagttctttctttccacagagcanattttcttttgtcatccaccatttacaatactctgtgaattagtattacttattacatttatgaaacggcaatatttggattgttaatanctcttcagt

SEQ ID NO: 1397 - DNA, 497 bp, Homo sapiens
acacctttaggatgctataaaaaactaatagaatatcataagaatggacacctttcttttaaatatgtgaagacctttaatatggatgaatatgtaggacttccaagaaatcatcctgaaagctaccattcttatatgtggaataatttttttaagcatatcgatatagatcctaataatgcacatatccttgacgggaatgctgcagatttacaagcagaatgtgatgcttttgaaaacaaaataaaagaagctggaggaatagatctttttgttggagggtttggttaataaaaactctaagaactgtgccaaatgggatcaaaatatcagctttattaaaggaattggtccagatggtcatatcgctttcaatgagcctggatccagtttagtgtcaaggacaagattaaagactctagcaatggataccatcttggcaaatgccaaatattttgatggagatttatcaaaagtgccaactatggctctaactg

SEQ ID NO: 1398 - DNA, 146 bp, Homo sapiens
acaaaactgtatttacaagaaaaccaattaaaaattaagggtgtgtgcaaaagtagacaggagagtcaagacatatcaatgcagggatggctttggggaatgggggactcaggttctacactggaacctggggtcatgtatcatgt

SEQ ID NO: 1399 - DNA, 146 bp, Homo sapiens
  misc_feature 13, 14: n = A,T,C or G
acctcagccccanntggtggcccgggaaccctggatgacagtgccaccatttgccgtgtctgccagaagccaggcgatctggttatgtgcaaccagtgtgagttttgtttccacctggactgtcacctgccggccctgcaggatgt

SEQ ID NO: 1400 - DNA, 122 bp, Homo sapiens
actgggattacaggcgtgaacccccgcgcctggcctgcttttctttttttaagactagctcttctaatgactaacagtgtcaaattgagcaagtacaagctttttttttttttttttttttt

SEQ ID NO: 1401 - DNA, 499 bp, Homo sapiens
acaaaagtgcttagtcaggctctaaatggagactcagactctgaagatatgttgaattcagaacacaagcacaggcataccaatattcacaaaatagatgcaccttctaaaagaaaaagttcctctgttacatcttcaggagaagattcaaaaagtcatattccagggagtgagactgataggacattttcttcagagtcaaccttggcacaaaaagctactgcagagaataattttgaagtggaactgaattatgggctgcgcaggtggaatggtagaagactcaggacctatggaaaggctccttttagtaagacaaaagtgattcatgattcacaggaaacagcagagaaggaagtaaaaaggaagagatcgcatcctgaattggaaaatgtgaaaatctctgaaacaactgggaattcaaagtttagacctgatactagttccaaatcatcagatttgggatctgtaactgaatcagatattgactgtacctcgg

SEQ ID NO: 1402 - DNA, 425 bp, Homo sapiens
  misc_feature 292, 402, 413, 423: n = A,T,C or G
actgggggaactgatgggggaactttcatcctgttaggaactccgctttccattcctgggtctctgtcttgctccctggagatggatggatcacggagggggccacagtcagctggggcaacaggtacgaataggagctcagcaggcagacgaatgaggaataaaggtcagagaaggtcagagctgagtgacgtttggaatccaccccgtttattgtagaactgggggttcagagggcaggtgcctcagagttgaggccacacagtgaggtctggtgggtgaaaggacccangaacgaggcgttcaggaaagcaggttgtcagagctatgtggagtctgtgggtggcaggggcagccgctccagcctttgaagactttgaaagccagagattcctggcgcangcttggacttnctgggagctnct

SEQ ID NO: 1403 - DNA, 315 bp, Homo sapiens
accaatttttagaaacatattgtcttctcagattgaagtggagggtccagaaatgcaacacccagcattctttaaagaaaataatagctagaatctttctgatacagattccaatatagattccattattcaaagtcctccacaaattactgggaaaatgtaagaggtaacttcacaaaaatcacatattgagtggaataattataactgatatataaataaggatttactaaaaaaaggcttcaaggggtgatattttaaatcaaggttttaaatacaaaaggtgtcttgtgttgcttaatcatacagtttcgt

SEQ ID NO: 1404 - DNA, 336 bp, Homo sapiens
  misc_feature 157, 211, 300, 301: n = A,T,C or G
acaccacctccaaaaataaaaaatggaaaacacacctttagtgaagtagaagtatttgagtatcttgatgcagtaacttatagttgtgatcctgcacctggaccagatccattttcacttattggagagagcacgatttattgtggtgacaattcantgtggagtcgtgctgctccagagtgtaaagtggtcaaatgtcgatttccagtantcgaaaatggaaaacagatatcaggatttggaaaaaaattttactacaaagcaacagttatgtttgaatgcgataagggtttttacctnnatggcagcgacacaattgtctgtgacagtaacagt

SEQ ID NO: 1405 - DNA, 446 bp, Homo sapiens
  misc_feature 323: n = A,T,C or G
acaaattctgagctgtctaacccctctgaaacggaatctgagcataaagacgagctgagtgattgatcattggcaggagaagatgatcgagacagccgacatcagcgtgacagcaggagacgcccaggaggaagaggcagaagtgtttcagggggtcgaggtcgtggtggaccacgtggtggcaaatcctccatcagttctgtgctcaaagatccagacagcaatccatacagcttacttgataatacagaatcagatcagactgcagacactgatgccagcgaatctcatcacagtacctgcccgggcggccgcccgggcangtacctggtgggtctgttcgaagataccaacctgtgtgccatccacgctaagagagtcaccatcatgcccaaagacatccagttggctcgccggatacggggagagagagcttaagtgaaggc

SEQ ID NO: 1406 - DNA, 272 bp, Homo sapiens
acagcctggagggtccctgacactctcctgtgcagcctctggattcacgttcagaaattttccaatgaactgggtccgccaggctccggggaaggggctggaatggatttcatacattagtggtagtggttctaccatatactacgcagactctgtgaagggccgattcaccgtctccagagacaacgccaagacgtccctgtttctgcaaatgaacaacctgagagccgaggacacggctgtttattactgcgcgagggcccccacatggt

SEQ ID NO: 1407 - DNA, 412 bp, Homo sapiens
  misc_feature 284, 309, 341, 342: n = A,T,C or G
tttttttttcgcaaagattcactttatttattcattctcctccaacattagcataattaaagccaaggaggaggaggggggtgaggtgaaagatgagctggaggaccgcaataggggtaggtcccctgtggaaaaagggtcagaggccaaaggatgggagggggtcaggctggaactgaggagcaggtgggggcacttctccctctaacactctcccctgttgaagctctttgtgacgggcgagctcaggccctgatgggtgacttcgcaggcgtagactttgngtttctcgtagtctgctttgctcancgtcagggtgctgctgaggctgtaggtgctgnncttgctgtcctgctctgtgacactctcctgggagttacccgattggagggcgttatccaccttccactgt

SEQ ID NO: 1408 - DNA, 189 bp, Homo sapiens
actgcaaagacacaaaatcaaaagcaacggaaaaaatagaaatacttaaagtgtggcaatactctttcacttaattctttacaagggatatcaaagccataatggacttcattagttttagggtagggaagggatactaattacttatttctttcaaaacatttttggtttttggtttttaaaattttt

SEQ ID NO: 1409 - DNA, 263 bp, Homo sapiens
ttttttactgtgaatatatactttttatttagtcatttttgtttacaattgaaactctgggaattcaaaattaacatccttgcccgtgagcttcttatagacaccagaaaaagtttcaaccttgtgttccacattgttctgctgtgctttgtccaaatgaacctttatgagccggctgccatctagtttgacgcggattctcttgcccacaatttcgcttgggaagaccaagtcctcaaggatggcatcgtgcacagctgtca

SEQ ID NO: 1410 - DNA, 356 bp, Homo sapiens
actgctgctgccttttcaccgaggcactgccaccaccagctctagcagggatgctcctgagcttggcggacatacttagatcctaacgtgccagtgagacctggctgtggagagtagcactggcagccctgcctggactccacttggcatgataccagctccagaagggaagggagtggagcaggcagtgaggagagagcctgggggtcggctggggacagccgtatgtgctaggtaggagtggagggagatatgtttaccaaatgcctgtcctgccatcctcccaggtagtcagagtgagctacatcctgccccgccttcatttccatggaaacatggcagctaggacacggggt

SEQ ID NO: 1411 - DNA, 256 bp, Homo sapiens
acgcttggagcgacctttggctacgtggctggccttgttatttcaccactctggatatactggaatagaaagcaacttacatacaagaacaattaactggagcaaagggagatatttctttgtgcagattctgtaagggctgggcagaaatgtgtatggtcaaagccaagcagttccatttacagctctgttttttacgtagttacaacatgatgtgattgtagctttttaaactatgaaacccctgagagattgt

SEQ ID NO: 1412 - DNA, 224 bp, Homo sapiens
acttttgaacaaccacacacaattcatcaagcacacacactcactcctgctcctctcacacacggccaccagagcagctcccctagttctcttgttcctcatagtgagcatagccactagcataggtccttcctaaattcaaattagtaaacaaatctgatgactcagtatctgaatcctttctgccttcatcttcttcctcttcatcatcctctgcttcatac

SEQ ID NO: 1413 - DNA, 394 bp, Homo sapiens
  misc_feature 384: n = A,T,C or G
acgcgaaattgtgttatgactgatagccttcagctacaaaaagataggactgacctggtttaaagtgttctattttgtaaatcattccatttgagtctttctgatgaacttggctatactgaaatctgttattttagtgaggctccaaaatgagcaaagctaggcctgattagagtagagtgactattaaaaaacataactttctaggagctataaatcaaagttttaaaaagatgtttggatatatttgagtattccgatcatgaaaacagaaattgccctgcctactacaaggacagactgatgggaaattatgcacctggtcaacttagcttttaagcagacgatgctgtaaaaactaacggcttctctgatatttattgnaagttttagt

SEQ ID NO: 1414 - DNA, 489 bp, Homo sapiens
  misc_feature 458, 466, 476: n = A,T,C or G
actctgaggcttgtaggagggtaaaatagagacccagtaaaattgtaataagcagtgcttgaattatttggtttcggttgttttctattagactatggtgagctcaggtgattgatactcctgatgcgagtaatacggatgtgtttaggagtgggacttctaggggatttagcggggtgatgcctgttgggggccagtgccctcctaattggggggtaggggctaggctggagtggtaaaaggctcagaaaaatcctgcgaagaaaaaaacttctgaggtaataaataggattatcccgtatcgaaggcctttttggacaggtggtgtgtggtggccttggtatgtgctttctcgtgttacatcgcgccatcattggtatatggttagtgtgttggttagtaggcctagtatgaggagcgttatggagtggaagtgaaatcacatggctaggccggangtcattangagggctganagggcccctgtta

SEQ ID NO: 1415 - DNA, 339 bp, Homo sapiens
  misc_feature 55: n = A,T,C or G
ttttttttttttttttggttcagtctaatcctttttgtagtcactcataggccanacttagggctaggatgatgattaataagagggatgacataactattagtggcaggttagttgtttgtagggctcatggtaggggtaaaaggagggcaatttctagatcaaataataagaaggtaatagctactaagaagaattttatggagaaagggacgcgggcgggggatatagggtcgaagccgcactcgtaaggggtggatttttctatgtagccgttgagttgtggtagtcaaaatgtaataattattagtagtaaggctaggagggtgttgattatta

SEQ ID NO: 1416 - DNA, 185 bp, Homo sapiens
cgacagcttgagtctcattgttcaggactagcctaggcaacatggcaaaaccccgtctctacaaaaatttttttaaaaattagccgggcatggtggcgtgcgcccgcagtcccagctacctggaaggctgaggtgggaggatggcttgagcccgggaggtagaggttgcagggagccgagactgt

SEQ ID NO: 1417 - DNA, 456 bp, Homo sapiens
acaattaaaaggtcatctatctcataactgacggctcaggtctgtccagttgccataattgcacaactggattccagctgctggtaataaggaattgtgtagatagataaagggcaagagtatgtctgcaatccaaaataaatgagagttaacacataattagccttttgattattttggcagctatcctcaccatttagtaaagggtatactaacaatacccaactttatttaacaaagttttgtaagcatacctaagtagtaacttgatatgctgaaaaatctgacctgtcacttcgcttcactctgaccagtaattgcagattgtcgtcaccatcctagcctatgactacattaggattttatgacttattaacttgaaaatctgttctgtaagtggcattggtagaatctcccactttgctcctcactgtccaattgtgtaaagattaaggt

SEQ ID NO: 1418 - DNA, 238 bp, Homo sapiens
  misc_feature 14: n = A,T,C or G
acagaaaacattanaaaaaatttattacagaattctaattccagtatgaatagtggaaacccatctgtaaattagatggatgttggatggaaaatgacattgctaaatttgagaatttctttttacctactaatgtagattgctttgtataataaaacacagggtttggaaggttttgttacagggagcatggtctgttgaagatttttaaaatgtatttttctagattaacttctgt

SEQ ID NO: 1419 - DNA, 386 bp, Homo sapiens
acatgaggccaaggtgaactgtgcatcctgagaccttgtgtccctgagtctcctttctgagtgcaagctgcactgtgagctggctgtgggatactcacacattcccacattctcctttctgccacatctcgcccttctggacctgcactgggagaaattcaggacaggagtgaactcaaggccatgaactcactggatttccatttttaggcacccatagggatgtttttaggatgtaagtttctgaggagaaagctagctctagcatgaagcttttttggattggcttctccatcgtgttggggtaacattttttttccaattttttttttcccaaaacatcgtctcagctcatttatcaagtaggtaaaatgagccttttgtgt

SEQ ID NO: 1420 - DNA, 392 bp, Homo sapiens
  misc_feature 37, 102, 191, 203, 262, 370, 374, 381: n = A,T,C or G
acaagctttttttttttttttttttttttttcctttnatcaaagtcttttagtgtactgtacactaaataaaatacacaaggcagcaatacttaggggccanaaacactgcttactacaagtcagttacggaatcataatttacagtaaaaatgggcacgtcccaaggctcaatttttctttttcttttgncatttacagtanaataaatattttgttgctattgctacactttaatttacattctaacctattaaatgcanaaagctagtgtaaagcatatagattaagtgtaggtcccatacgtatgacagtttgttcaaaactagtaggtttttgtttttgtatctttttttaacttattaaatggntagngggaaanatttgtgcttg

SEQ ID NO: 1421 - DNA, 368 bp, Homo sapiens
acaaacaatgtttatttgtttgtaaagtgccaggtttatatttaagtaaacattaaaatctgcgttgaagcagtgaggctgcatcttttaactggctgtgctggttaaaggactgtttaatcccgctgtgctaagctcactaaagggtcacccctcactttaaagccaagactgccattgtcactgctatggtaagtcacagccagccaggccttctggcaaaaggtgatactaccagcactataaacagacaggactggttgtgaggtagctacacagttttaaagatgctgttaatgaacattacggacaattcatggtgtggctagttggtaacacttcagctgatttttcttatgagatggaaa

SEQ ID NO: 1422 - DNA, 245 bp, Homo sapiens
  misc_feature 18, 19, 179: n = A,T,C or G
actgcaatcacaatgccnnatggtgtttatgggctatttgtgtaagtaagtggtaagatgctatgaagtaagtgtgtttgttttcatcttatgaaaactcttgatgcatgtgcttttgtatggaataaattttggtgcaatatgatgtcattcaactttgcattgaattgaattttggntgtatttatatgtaattatacctgtcacgcttctagttgcttcaaccattttataaccatttttgt

SEQ ID NO: 1423 - DNA, 583 bp, Homo sapiens
  misc_feature 548: n = A,T,C or G
actaccccaaataactttcttattgctctgaaagaagaaaagcaatgtaaatcactatgattattgcgcaaacaaccagaattctccaacaattttaagtaatctgatcctcttcttggagaaaattgttacctaatagtttttccttatgaatgttattactactggtataaatcaaatttctataaatttcctacttaagtcttaagaactgggttcttcctttgatgttattcatgttcagaaaggaaacaacactttactcttttaggacaattcctagaatctatagtagtatcaggatatattttgctttaaaatatattttggttattttgaatacagacattggccccaaattttcatctttgcacaatagtatgacttttcactagaacttctcaacatttgggaactttgcaaatatgagcatcatatgtgttaaggctgttatcatttaatgctatgagatacattgttttctccctatgccaaacaggtgaacaaacgtagttgttttttactgatactaaatgttggctacctgngattttatagtatgcacatgtcagaaaaaggcaag

SEQ ID NO: 1424 - DNA, 351 bp, Homo sapiens
actgtgaggttgcaccttccattatttgagtgcctggaaggattcctctgatgcattcattcagaaatggcatccactgggagacccagggaaaggagagagcaggctgctgggctcagctgcagcaactttgggaggggctaggggcatgagatacggaccaggatatttttttaccttctagagagcacagggcacatagcagccaggctgcaacaaatatgactcccacacactgctcttttgccattcacaaataccactttttaaaacaatacaaggctcattccacagaaggtaaatgaaagaaaccccactctccaagttctcaaaatgggattgctctcaagt

SEQ ID NO: 1425 - DNA, 157 bp, Homo sapiens
ccgggctgctgataaaagaagtaaggctttgaaagcttcagcgcctgctcctggtcatcactaaccagatttacttggagtacatgtgaaagaaaacgtcagtctgcctgtaaatttcagcaagccgtgttagatggggagcgtggaacgtcactgt

SEQ ID NO: 1426 - DNA, 509 bp, Homo sapiens
acccagacaaaacccggccacgtgtaagtcagatgctgattttgactccatttcaaggtcaaggccatggtgctcaacttcttgaaacagttcatagatactacactgaatttcctacagttcttgatattacagcggaagatccatccaaaagctatgtgaaattacgagactttgtgcttgtgaagctttgtcaagatttgccctgtttttcccgggaaaaattaatgcaaggattcaatgaagatatggcgatagaggcacaacagaagttcaaaataaataagcaacacgctagaagggtttatgaaattcttcgactactggtaactgacatgagtgatgccgaacaatacagaagctacagactggatattaaaagaagactaattagcccatataagaaaaagcagagagatcttgctaagatgagaaaatgtctcagaccaggaagaactgacaaaccagatgaaccaaataggaaataagcatgcaacatgaacagctgg

SEQ ID NO: 1427 - DNA, 519 bp, Homo sapiens
acttgaaacttagctctctatcctgaaagttgaagttagggttctttgatcctggtgagatgttaattgtaattttaattttcatatgttaatattgtgacttgtattttgtgatgagtctctagaatgattaaatgactatttttttatgaaaaattttttgttaataaaatatctgagggtattttgagtatgtggaaggaatgcctgaatagaagctgatctatcttaacatacctcaagaactccagttttaatatggtgagtgaggagttgactggaaaaaggagagatccaattcttgttctagtccttggcacatacactctctgggttttgagaaaaggatggtcctacaacgattctaagttgttttctcattggtcctacaacaattctaagttgttttctcaaaggcaaaagcatgatttcaaaatgacatcacttgtcagattttctggtgtatggaaagatttaataaatcctgcctcttttgaagcctgaaacttacaatttaaa

SEQ ID NO: 1428 - DNA, 484 bp, Homo sapiens
  misc_feature 474: n = A,T,C or G
actgggcgggtgaaacgattaccacccatagtgcgaggaggagccatcgacagatactggcccaccgccgacgggcgcctggttgaatatgacatagatgaagtggtatatgacgaagattcaccttatcaaaatataaaaattctacactcgaagcagtttggaaatattctcatccttagtggggatgttaatttggcagagagtgatttggcatatacccgggccatcatgggcagtggcaaagaagattacactggcaaagatgtacctgcccgggcggccgcccgggcaggtactcccgattgaagcccccattcgtataataattacatcacaagacgtcttgcactcatgagctgtccccacattaggcttaaaaacagatgcaattctcggacgtctaaaaccaaaccactttcaccgctacacgaccgggggtatactacggtcaatgctctgaaatctgtggancaaaccacag

SEQ ID NO: 1429 - DNA, 327 bp, Homo sapiens
  misc_feature 15: n = A,T,C or G
ttcgcgagagcctanagccagatgcctatgcgttgttccataagaagctgaccaagggtgtgctgatgcgggaccccaagttcttgtggcgtgcccagtgctcctttggcttcatatatgagcgtgagcagctggaggcaacttgtccccagtgtcaccagaccttctgtgtgcgctgcaagcgccagtgggaggagcagcaccgaggtcggagctgtgaggacttccagaactggaaacgcatgaacgacccagaataccaggcccagggcctagcaatgtatcttcaggaaaacggcattgactgccccaaatgcaagttctcgt

SEQ ID NO: 1430 - DNA, 507 bp, Homo sapiens
ctgtcaaatacatttcagttcactaatgaagcccgagaaatgggtgtgattgctgccatgagagatggttttggtttcatcaagtgtgtggatcgtgatgttcgtatgttcttccacttcagtgaaattctggatgggaaccagctccatattgcagatgaagtagagtttactgtggttcctgatatgctctctgctcaaagaaatcatgctattaggattaaaaaacttcccaagggcacggtttcatttcattcccattcagatcaccgttttctgggcacggtagaaaaagaagccactttttccaatcctaaaaccactagcccaaataaaggcaaagagaaggaggctgaggatggcattattgcttatgatgactgtggggtgaaactgactattgcttttcaagccaaggatgtggaaggatctacttctcctcaaataggagataaggttgaatttagtattagtgacaaacagaggcctggacagcaggttgcaact

SEQ ID NO: 1431 - DNA, 213 bp, Homo sapiens
acatgctttctttgcatctggcacctgagcaccaaggctgctgagtcccacgatggagtagaaggcagattccaaatttgtgaaagggcgatccagcgaggcttttagtctctccacgtcatgcttggtgaggtagtgagtgggcgtcagagcccaggtgctggctatgattgtcagggccaacaggaagacagtgcttgaacccggcggcgc

SEQ ID NO: 1432 - DNA, 250 bp, Homo sapiens
actatagggtaaatacgggccctatttcaaagatttttaggggaattaattctaggacgatgggcatgaaactgtggtttgctccacagatttcagagcattgaccgtagtatacccccggtcgtgtagcggtgaaagtggtttggtttagacgtccgggaattgcatctgtttttaagcctaatgtggggacagctcatgagtgcaagacgtcttgtgatgtaattattatacgaatgggggcttcaat

SEQ ID NO: 1433 - DNA, 580 bp, Homo sapiens
  misc_feature 505: n = A,T,C or G
acacttgaaaccaaatttctaaaacttgtttttcttaaaaaatagttgttgtaacattaaaccataacctaatcagtgtgttcactatgcttccacactagccagtcttctcacacttcttctggtttcaagtctcaaggcctgacagacagaagggcttggagattttttttctttacaattcagtcttcagcaacttgagagctttcttcatgttgtcaagcaacagagctgtatctgcaggttcgtaagcatagagacgatttgaatatcttccagtgatatcggctctaactgtcagagatgggtcaacaaacataatcctggggacatactggccatcaggagaaaggtgtttgtcagttgtttcataaaccagattgaggaggacaaactgctctgccaatttctggatttctttattttcagcaaacactttctttaaagcttgactgtgtgggcactcatccaagtgatgaataatcatcaagggtttgttgcttgncttggatttatatagagcttcttcatatgtctgagtccagatgagttggtcaccccaacctctggagagggtctg

SEQ ID NO: 1434 - DNA, 168 bp, Homo sapiens
  misc_feature 91: n = A,T,C or G
acagccccagtctttgcaatttatcatcgatgcgtttaagggacaggtatttgccttatccacacatccttatggctgccgagtgattcanagaatcctggagcactgtctccctgaccagacactccctattttagaggagcttcaccagcacacagagcagcttgt

SEQ ID NO: 1435 - DNA, 565 bp, Homo sapiens
acacacatgttctcatatatgtatatatacatacatattcatatatgtgtatacatatatacatatgaaacaagtttttaaatgttggcagcatattttcacaactgcaacctaaacaaccactggaagtgggggtccacttaagttttgtttgccattagcttaataggggaaagctattttaattttccctgcaactttttggatatgagttatgatctcaaaatgtcatttaactattgcactaaaaagtaatttgaccttggaactcctttctagatggaaggagaataaagacatctgtagcatgtaattctatttttatttcttgactacataacctagcagtggtctaatactgaccgtttcaatttaaatgctggaaaaatactgaccaagactttctgtgaaaaagataatggaaaacagaaaccagttagtaaagccatgcaaataggaagtgattttcagccccaagaggactttgtatcatctatggctccatttaaacccaaagtagcatccgtcctggtggattttgaacatccttttgatttaacacaga

SEQ ID NO: 1436 - DNA, 361 bp, Homo sapiens
actttccaaaagctaagggatgaaagaaaatctactgtttatcggccataaggttatatactgtttcttagcaaccagggtttgtctttcagagactagaagtcgatgaaaaaggagagactaaaaataaaaccatctggacagttccaattcacagaggcagcacttcaaaggcagtgatgttgtgataaaccatactgttgagttaaagttcattccattggctagaaagagaggctcatgacacttgcttaataaatgtttcccggatactcactgcagtccctgaaccaaagaccaggaataaaagctacctatctgttcctgcatagagcacatatcaacatcagggatgagaggt

SEQ ID NO: 1437 - DNA, 321 bp, Homo sapiens
gacagattggaagtggggcaacctcagttgtcagggaatctgccagggcaggcggatggaagctggtcgtgcaagcctcatgagctttctgttttgggaggccattttgagctttctgttctgaaaccctgggagccatcgctggggcctaagaagggacgagactctccaggtctgagatggaaaaatcaccctagaaaaataccaactcagaaaataaaaagcagaaagcaactgtatttcaggtttgagaacctacttagaattttaaaagtcatcttgaaaatgtaagtttagaataatttattagggttttattgt

SEQ ID NO: 1438 - DNA, 406 bp, Homo sapiens
acagcaattgtagtaactgacacatcctctctttgcaagctgctgactgggcacactcatgccaagtttcagaattattggtcttctgggtttttgctttttaaaagaggtgtgggagcagaggaatggaaacaatcgtgagtttttgagctagggaaagttggagctcctttaatctttttaaaggatcagtgctgccctaagtgaataaactcaattgtccatctttattttagagttttaatgaattcaaggaagggagcatagcatatctgtggcaaactattttccactcaaatcctgagttattgctgcatgctttaatttcttccctttcagcatctgagaaccttaaagccaatgtctgcgatctttttttagatatttatacttttagatatatagt

SEQ ID NO: 1439 - DNA, 257 bp, Homo sapiens; identical to SEQ ID NO: 1267

SEQ ID NO: 1440 - DNA, 181 bp, Homo sapiens
acagagattgctttttaatggatttctataagtagtattaataggaaaaagcatataatacaatctactctgtatctaagagctttaatttattcaaatattggaagaaattcatcttctgaatttttcttatttaaaaagcattatgagaactgattcaaggatggaggaatcaattagt

SEQ ID NO: 1441 - DNA, 181 bp, Homo sapiens
acaacaaagactatttacaatgcaaaaagtatataaaccacaatttaacagtctgctactggcagccactatagtttaggaggtagctttaattaaacgaaatgaacagaagccacatttcccaacttgtgttctaaaaataatttacataagataaaaattcattatatacacagtatgt

SEQ ID NO: 1442 - DNA, 444 bp, Homo sapiens
  misc_feature 390, 403, 443: n = A,T,C or G
accgcggccgttaaacatgtgtcactgggcaggcggtgcctctaatactggtgatgctagaggtgatgtttttggtaaacaggcggggtaagatttgccgagttccttttactttttttaacctttccttatgagcatgcctgtgttgggttgacagtgagggtaataatgacttgttggttgattgtggatattgggctgttaattgtcagttcagtgttttaatttgacgcaggcttatgcggaagagaatgttttcatgttacttatactaacattagttcttctatagggtgatagattggtccaattgggtgtgaggagttcagtttatatgtttgggatttttttaggtagtgggtgttgagcttgaacgctttcttaattggnggctgctttttangcctactatgggtgttaaaattttttactctctctacaang

SEQ ID NO: 1443 - DNA, 473 bp, Homo sapiens
gtggtgttgagctgattattaacagttactgaaatcaaatatttatttgttacattattccatttgtattttaggtttccttttacattctttttatatgcattctgacattacatattttttaagactatggaaataatttaaagatttaagctctggtggatgattatctgctaagtaagtctgaaaatgtaatattttgataatactgtaatatacctgtcacacaaatgcttttctaatgttttaaccttgagtattgcagttgctgctttgtacacgaacttgctccaacagtgctgaaattcgtcataattcatgatcttcatggtggcacgcggaccgtctcttttctgacacaggctgcgaagcgcctcctggtaatctgggtcccagaagtagtagaggcgggcaacaaagatggtcagggtaaccttcgggtcctcggccaggaacgtggccatatcccttgc

SEQ ID NO: 1444 - DNA, 289 bp, Homo sapiens
gcgagtaagatggaagatgaggaggtcgctgagagctgggaagaggcggcagacagcggggaaatagacagacggttggaaaaaaaactgaagatcacacaaaaagagaggaaatccaaatctcctcccaaagtgcccattgtgattcaggacgatagccttcccgcggggccccctccacagatccgcatcctcaagaggcccaccagcaacggtgtggtcagcagccccaactccaccagcaggcccacccttccagtcaagtccctagcacagcgagaggccgagt

SEQ ID NO: 1445 - DNA, 385 bp, Homo sapiens
  misc_feature 376: n = A,T,C or G
caattatcatgtttataaggttgggtgggctaggtaagatgatgtagagggtgacattaaagtgtagaacagagaccacttaggtggaagcaggcagccttggactttgctaaagaccagtccatgtgactgacatggggtcacttcaaatggtagtgcctccctcactgaagagcatcagaagggcttctgagcaaggccagaatgagcctcgatgaacatccaagttgaccaaccagtgtggtgcctaacagaggacagagccaccagcaggggtgctcaggggctgctccccttttattaatgacagcggtttctctcaaggaagtgtagtgccctcccctttgggatagttgcctgacccctgtccatcagnccttcaagt

SEQ ID NO: 1446 - DNA, 572 bp, Homo sapiens
  misc_feature 15, 16, 564: n = A,T,C or G
accagaagaccttannaaaaggaggaaaggaggagaggcagataatttggatgaattcctcaaagaatttgaaaatccagaggttcctagagaggaccagcaacagcagcatcagcagcgtgatgttatcgatgagcccattattgaagagccaagccgcctccaggagtcagtgatggaggccagcagaacaaacatagatgagtcagctatgcctccaccaccacctcagggagttaagcgaaaagctggacaaattgacccagagcctgtgatgcctcctcagcaggtagagcagatggaaataccacctgtagagcttcccccagaagaacctccaaatatctgtcagctaataccagagttagaacttctgccagaaaaagagaaggagaaagagaaggaaaaagaagatgatgaagaggaagaggatgaagatgcatcagggggcgatcaagatcaggaagaaagaaggatggaaacaaaaggactcagcaggatgcttcatggtcttcagcgtgctctttgctaaaaactggagctgaatctatcagtttgcttganttatgtcg

SEQ ID NO: 1447 - DNA, 228 bp, Homo sapiens
actgtgagggatagacaagcctccatccacagctcccttcagggcaccaaaaactttattgccagtggtagttctggcaaggcctgcatccaaatagcaggtgaaggcacctggctgaccatcaatgctttccacattgtattcatcaccagtcacctccacttggccttcatagatcttgtccatgccaaacctattgagaagcctgcgggccagcagcaggccagt

SEQ ID NO: 1448 - DNA, 333 bp, Homo sapiens
  misc_feature 230: n = A,T,C or G
ggtggggcagcacacctctggggggataatgtccccactcccgaaagcctttcctcggtctcccttccgtccatcccccttcttcctcccctcaacagtgagttagactcaagggggtgacagaaccgagaagggggtgacagtcctccatccacgtggcctctctctctcctcaggaccctcagccctggcctttttctttaaggtcccccgaccaatccccagcctangacgccaacttctcccaccccttggcccctcacatcctctccaggaagggagtgaggggctgtgacatttttccggagaagatttcagagctgaggctttggt

SEQ ID NO: 1449 - DNA, 606 bp, Homo sapiens
acattgctttgacttaaaaattgaagtccattattctgaccgaaagttaatctgatgattaattggttaaacatactatcgttgctaattagcataattattatttacaataaagtgagctaaatagctacaactaaaatatatttaaattactgtgatattgtgatgctaaagatgtgttgaaattaatatcttgaatttctcaaccctgcctaaatgcctctgagagtaattagtataattaaaagtcactagagaaagtgaatgactctaataacaggataacaaattcttttcaagtcagatggtttccagttctttgctttcaacaaaattaatggtggcccatgaattgtcagctgatgaaggaacactatttggtttttggcatgcaactcggaaagaaaccaaacgattgattgacatgcttacaacaaaactactagcattctcacctatttatgtaaaaccatttctcagcacttgtatctgtgaaaacaacagaattgaaaatgaaccctgttaatctaccagtaggaactattcatccagataaaatgaattaattggtgggtcagccccatctatctcactaagagatgtgtt

SEQ ID NO: 1450 - DNA, 536 bp, Homo sapiens
  misc_feature 27, 28, 107, 403, 457, 484, 498: n = A,T,C or G
gctttaaaataatagaccttacaaagnnttctagacagacttcctgtgaagaacaaggagcagggggaaaggggaaggggtagaatttaccaatctgaatatttcancaagggagaatgcatgagttttactataaaaccacactgaacattgcaacaatactaaattccatacatatataataatcactgagctataaggttgctgatgtatttgttcttgaaagtgaattagagttactttatgcagaatcagctagttttatgtttcataatgtctttcccttttttgaacttttttttaagtctaaagtagggggaaccaagcctgctggtggtgattttggagaagtcttgaattcggctgcaaatgctagtgccaccaccacggagcctcttccagnaaaagacacaggagagcctgtgagattcctacctttgttctgctacccactgcnagatgctgcaaagcgaggcccaagcanatcttgtcaaacangcattgccatgaaatttctaccagatgtgcttttattt

SEQ ID NO: 1451 - DNA, 314 bp, Homo sapiens
  misc_feature 291: n = A,T,C or G
cagtgccctgccagtagctcctagagaggcaggggttaccaactggccagcaggctgtgtccctgaagtcagatcaacgggagagaaggaagtggctaaaacattgcacaggagaagtcggcctgagtggtgcggcgctcgggacccaccagcaatgctgctcttcgtgctcacctgcctgctggcggtcttcccagccatctccacgaagagtcccatatttggtcccgaggaggtgaatagtgtggaaggtaactcagtgtccatcacgtgctactacccacccacctntgtcaaccggcacacccggaagt

SEQ ID NO: 1452 - DNA, 520 bp, Homo sapiens
  misc_feature 431, 494: n = A,T,C or G
acacacacatggggaacacaccacagcttagatgtgacaaagttccttctcatatgactgttccctcaaggtaagactaagatgggagggggagaaaaagaatcctaaaaagccaatttttaaaaattctgctttggctgattttgtgctataatgggtagctgatttctaaaaatcatatttcttcaaagagttttatatcgaaaggaagactaaatgtaatgtgcctttccttataatccaggaaaacaactgtggtatttcaaaaattctaaaaatatctactttcatgaaatagtaactatttcactacaaacctatttttcactaaatacacacatttcctaatcctggagcctcctgggaaaagcagtgggttctccctgggtcttgcaagactccagtgtttcacaggagagtgtggggaatancttcaccccgtctcctgggatgggctttgtcagaggtcacgtgcagagacgctatcagacttncaccaggcatgtttaagcaattaccc

SEQ ID NO: 1453 - DNA, 470 bp, Homo sapiens
  misc_feature 455: n = A,T,C or G
acatcgaccgcattgccatacctgatgcctctaagctgcaattcatcctagcagaggagcagtttatcctttcccaggttgcactcctggagcaggtgaatgccttggtgcccatgctggacagtgctcacatcaaagccgttcctgagcatgctgcccgcctgcagcgcttggcccagatccacattcagcagcaggaccagtgtgtggaaatcactgaggagtccaaggctctcgtggaggaatacaacaagactacaatgcttctctccaagcaattcgtgcagtgggatgagctactttgccagctagaggccgccacgcaagtgaagccagcagaggagtgatagctgctccccatcccaaggtgggcctgggcagtcaggctccagggccctatgccaacctgcctttgttacaaggcaggaggaagctttgtatttattggcttcaangcccacctctctgta

SEQ ID NO: 1454 - DNA, 297 bp, Homo sapiens
  misc_feature 269: n = A,T,C or G
actcagggttctgaatcactgggggttcccactctccgtccatctcttcatcccagtcctcgggcttcttagcatcagggtcggggatatgctcgggcttgtcccagtcctcaggcttggagtctgtgggatcatcgatcttggcccgctcatcccagtcttccggttttgaagcatcaggatcctttatcttcttgggtggcaggaagtcccaatcgtcttccaaggagccggactccacctggctgttgtcaatcttcacctcatangtgttgtctggccgcacaatcagtgtgt

SEQ ID NO: 1455 - DNA, 238 bp, Homo sapiens
acaaggcccctctgcaactggagagaaaattaattcctatcccgtgagtggattgtgagaaattccacccacgtggagacagcttactgcagcactgttggtgttcggagctcttctgtgccctggctccatgctttcacctacacaagcatcaccttcctaatcaccgcggggcggggagcgtgtggctgtgccccttctctttaatctcatttaatttttattaaacatgctcagg

SEQ ID NO: 1456 - DNA, 452 bp, Homo sapiens
  misc_feature 422: n = A,T,C or G
actatctgcccgtggtggggatggcagtaggatcatatttgatgacttccgagaagcatattattggcttcgtcataatactccagaggatgcgaaggtcatgtcctggtgggattatggctatcagattacagctatggcaaaccgaacaattttagtggacaataacacatggaataatacccatatttctcgagtagggcaggcaatggcgtccacagaggaaaaagcctatgagatcatgagggagctcgatgtcagctatgtgctggtcatttttggaggcctcactgggtattcctctgatgatatcaacaagtttctttggatggtccggattggagggagcacagatacaggcaaacatatcaaggagaatgactattatactccaactggggagttccgtgtggaccgtgaangttctccagtgctgctcaactgcctcatgt

SEQ ID NO: 1457 - DNA, 548 bp, Homo sapiens
  misc_feature 371: n = A,T,C or G
accttcctctcaattttgctgtgaacctgaaatggctttaaattaatactcttattttttatttaatttaattacataaattaaaccttaccatgaccaaattgtgttaggacggcctgctatctacagcacagtgtgtcatttgcagatttgtggttacctataccacgctaggtgttttgacatgtttagtatttctgctttacagtgctgaattccatattttagaagctatgaaagtccttttatgaaaaagttactgattgcttctcagttattaggaaaacagttgtttcacaattattatgtagatatgatgcccaaatatcatttttagtatatcttgtcgatctttaagttgttactattgngttattcatgtctttaaatcagataccaaatattttttaggaaagaaaaatgttattactgtcattaggttgtcttttaatactttaagttattttgacgaaaagtaatagagaaaatttacttagcattttagattctagagacatggaaatgaaaattattttatgtctagagta

SEQ ID NO: 1458 - DNA, 246 bp, Homo sapiens
actaatgtagttccactgtcaagtcttaacattcttcaaaccagtgtctggggttgatagactatttgtttgacatggcacaatgttttgaattgggtgggaatcttttcccccagttagaaaaacagatttaaataacttgtgctactgaaatcatttttacggaaaaatgagatgtgaatcagttcaagttccagtctaatgagttaatgtctctcactctctggcttcatgccatgtctccgt

SEQ ID NO: 1459 - DNA, 301 bp, Homo sapiens
gctttcaacaaagattgaaattaaactgaaaaagccagaggctgtgagatgggaaaagctagaggggcaaggagatgtgcctacgccaaaacaattcgtagcagatgtaaagaacctatatccatcaccatctccttatacaagaaattgggataaattggttggtgagatcaaagaagaagaaaagaatgaaaagttggagggagatgcagctttaaacagattatttcagcagatctattcagatggttctgatgaagtgaaacgtgccatgaacaaatcctttatggagtcgggtggt

SEQ ID NO: 1460 - DNA, 417 bp, Homo sapiens
actcctgaaatcagacatgttcctgtagaaagaattttaagttaggctttctatgcacctatcaagaatcaagagaatagattgtatcaaacaacggcagggaaatccttcagcaattctaatccactttgggttttcagctgtttttacatctaaagcaatagactagaactgaattatcttctacatagtaaaatcacaattgtggaattacaggaattctggtgatattaaggtgaaataacaaaacacaaaaggccctattttaacagttgatgtgacagtaagttttaatagaacctgtaacttcattttggaaatgcttctccaccaaataagggctttttcccctatttaaggagccagatggattgaaagatgtggaaataggcagctgtagatcttgatcttccaggt

SEQ ID NO: 1461 - DNA, 476 bp, Homo sapiens; identical to SEQ ID NO: 482

SEQ ID NO: 1462 - DNA, 257 bp, Homo sapiens
actatagggtaaatacgggccctatttcaaagatttttaggggaattaattccaggacgatgggcatgaaactgtggtttgctccacagatttcagagcattgaccgtagtatacccccggtcgtgtagcggtgaaagtggtttggtttagacgtccgggaattgcatctgtttttaagcctaatgtggggacagctcatgagtgcaagacgtcttgtgatgtaattattatacgaatgggggcttcaatcgggagt

SEQ ID NO: 1463 - DNA, 288 bp, Homo sapiens
  misc_feature 29: n = A,T,C or G
acaattacccaccactggatttgactcanagaggacccccagagggtgtctccatcttccctatttattttcagcccttgagggcttcattgtagatcaaagccaaggcccccaggaaggtgacatactcctggaagttcacctcctggtccttgttccggtccaagtcttccatcagccttgcaatttcagcatcctgcagcttcgagccaatggtgagctccttctggatcagctccttcagctccttcttgctcagggtgtgcttgtcaccctccctgccggagt

SEQ ID NO: 1464 - DNA, 122 bp, Homo sapiens
acctgaaaactgtgagcggataagtcaaagtggggactttctcaggtatcattacaatggcacgcttctggatggcaccctctttgattccagctgctctcggaaccgcacgtttgacacgt

SEQ ID NO: 1465 - DNA, 496 bp, Homo sapiens
actattagaatgagtaacagagaacaaaccaccagcagcaaaaggttctaagtctgactgatgtgtagatgaactgacagatgagaaatttttaaattagagctatttggcccacatccttaatatttcaagatcaacataaaaataagaaatacaggtgggaatgataaagaatatgtctaggtcagagaaaaacattttgtctttcagttatcagctgtaatttgcatttccatcaccatctaataaacctttgaatataaatgtggacagagttatctgaattatctcttgcattccctgatctgaaaagttggaaatttattctaactcagacatcttggtctcctatgttgacaaggtgtttagtaataaaatgattttcacactgctgttccttcctgcccccttccctcccctagcctcacctcattgaattcagcacagttttgaaagatcaatctaaaatcagctacaaaatcttcaggttttgagt

SEQ ID NO: 1466 - DNA, 545 bp, Homo sapiens
actcaactaaattggagaatgtttctgaagaaaattggatgaaattagctgctgagattgagtttctgccttaaaatctgaaacaaaaaaagggacaaattgctggtagatctactgactgtagccatcaccagaacacttagtttcttcccagacatgaatttcctgacaggctctgagccagaaacacactgtgggcgtgcatctggttcagccctggatatgcctccactgtggagggaagcattggaactggagttgtgcacagcaccgcagctagtgggcctggctgggggtgcagaagggcagggtagttctttccatttccccttgcagctacacttactttctccctgactaccaaatggagtgacggttgaagaatcaagctcataatatgatacacccagacagacccagaaatcttttgatttccccagcgagatacttaccactctctcttctctttcccatggttaaaacaggagttgtgttctctgtcgctgctaaattattcttcacttgagtgaagcaaatatttagct

SEQ ID NO: 1467 - DNA, 351 bp, Homo sapiens
acacctttgccattgcggacgaagaggactatgctggggaggtgaaggacctggggctcagcgagagtggggaggatgtcaatgccgccatcctggacgagagtgggaagaagttcgccatggagccagaggagtttgactctgacaccctccgcgagtttgtcactgctttcaaaaaaggaaaactgaagccagtcatcaaatcccagccagtgcccaagaacaacaagggacccgtcaaggtcgtggtgggaaagacctttgactccattgtgatggaccccaagaaggacgtcctcatcgagttctacgcgccatggtgcgggcactgcaagcagctagagcccgtgt

SEQ ID NO: 1468 - DNA, 505 bp, Homo sapiens
  misc_feature 488: n = A,T,C or G
actgcttgatggtgtccagggtctcttcctcacgcttcagtttgataacgtttgggtctgggaccactttctgggcaaacttccacacagagtcttcaaaggtggcggagaaaagcagcatctggcagttcctgggcagcatcctctggatgcggatgctctgatcttggtggccctgagtggctatcatgacatcagcctcatccagaacaaacaccttgattttcttgggatcaatgaacttgagcttggagcaccagtccagcacagtcccaggggtgccaatgacaatctgctcactgatcttctggcctctttccaatttattgcctcgaacagcataagctagcttcagttcagggtaaaatttgcccatttgttcaatcacttttcctgtttggagggcgagctcatacgttggggagagacatagacactgggggtatttgtttgcaggttctacttggctaagcatggccagcacgaangcagctgttttaccagt

SEQ ID NO: 1469 - DNA, 215 bp, Homo sapiens
actacaagcccaccaagctaaagaggctgcccagaaagcagttaacagtgccaccggtgttccaactgtttaaaattgatcaggggccatgaaaagaaacttgtgcttcaccgaagaaaaatatctaaacatcgaaaaacttaaatattatggaaaaaaaacattgcaaaatataaaataaataaaaaaaggaaaggaaactttgaaccttatgt

SEQ ID NO: 1470 - DNA, 667 bp, Homo sapiens
acatatagtcaatgaaatattcaaagaataactttatatactcttgttctttaaattctatcctctctttcagaattcttccatttaagtttgggtattttcctagtttcaacagatgaacagaagacttcattgaacattttgacagtaagctactagagaccaattatcaactggtgctacacatgctgtgttatctcccttactattaaactataaccctctcttgctattttgtttcatgcatcaccaaccaaacttcattttttctaataaaaaataaatatataaagaagacactgacaggcatatattcacaagatctcaacttcttaaaacataagtatgggtatatttatttctctcaaatgcatacaagacaataattacacagcaacaaatcttttgttcaacaatgatttgattcataagcatttgaaatttacataatttcatatcaatacccttgtatttttaaatacagtaagtaaaaaagcccccaaataaccaattcttatatttcctatttatccctctatacatccaaacttttaaaaagttacaaactgaacattatacagaacatataaatcatgtttaaaaacttgaggttttaaaaatcactgcttccccaatatgattcagaaaaattctcatactgacaagt

SEQ ID NO: 1471 - DNA, 165 bp, Homo sapiens
  misc_feature 89: n = A,T,C or G
acatttaaggactgggctaatgctaatgtcagcagacagattgaggacactgtattatacggttactatactttatattctgttatatngttctgtgtgttcttctggatcccttttgtctacttctattatgaagaaaaggatgatgatgatactagtaaatgt

SEQ ID NO: 1472 - DNA, 152 bp, Homo sapiens
ccatgcaaatctattaatcactaagggctaagtcactaaactacagctttcccatgatgctcaccatccatcctttgcggaaaccaaaatgctcacaactgaccatggtgttcacttagtatactagcttaaattaaaaaaaaaaaattagt

SEQ ID NO: 1473 - DNA, 402 bp, Homo sapiens
  misc_feature 39, 72, 97, 143, 163, 175, 189, 195, 217, 265, 322, 335,339, 341: n = A,T,C or G
tttttttttttttttttttttttttttttttttaaaaanaattgtttatttaccgaacctggggcatattanatacaaccaattttaaatttacatnttttaaatcagttttgaagtgtttcacacacacaaaaaacttggcntgcaacagttgtcctaaggngaaagtcacctnattaataaactgtngcaagngttctcacccaagggggaagtntggtttatcctgaacatgaaaacctgtaacaaatttaaattaattatntaaaactcgttacttgtagttttgcccttgcaaagatccaaaaaaaaaaaaaaagcncaagtaactaatntgtntnagtcacaacataatcctggatcatccccataccaaaaccggatgcttttttaattttaaac

SEQ ID NO: 1474 - DNA, 173 bp, Homo sapiens
  misc_feature 148: n = A,T,C or G
acccttgagacctggaaccagagccacaggccccttttgtgggtttctctgtgctctgaatgggagccagaattcactaggaggtcatcaaccgatggtcctcacaagcctcttctgaagatggaaggccttttgcccgttgaggtanaggggaaggaaatctcctcttttgt

SEQ ID NO: 1475 - DNA, 364 bp, Homo sapiens
  misc_feature 90, 92, 103, 115, 116, 128, 129, 136, 148, 155, 205, 206: n = A,T,C or G
acatctcaatcagatcacgtagtgtctttaaataggctattgcattgccgtctgtattacagcactgtcaagaaatctacaaaacacacntnacacactcttnaaaaaacaagtnnaacacgcctttnncgtcctncaaaagaggttncacagcnataagaaaaaacaaaaaccaccgtgaaagtaaagtgcttgtcattgcttnnaagaggaaacacacaatggtttctgaggcctttgatctatggcattagaacagaaatcattttaaaaaggggaaggagttttgtgttggaatcaattgtgctacctctgtaaaaatgaaggcaagggcctggctgccccaagatggtctggattctct

SEQ ID NO: 1476 - DNA, 521 bp, Homo sapiens
acacttgaaaccaaatttctaaaacttgtttttcttaaaaaatagttgttgtaacattaaaccataacctaatcagtgtgttcactatgcttccacactagccagtcttctcacacttcttctggtttcaagtctcaaggcctgacagacagaagggcttggagattttttttctttacaattcagtcttcagcaacttgagagctttcttcatgttgtcaagcaacagagctgtatctgcaggttcgtaagcatagagacgatttgaatatcttccagtgatatcgactctaactgtcagagatgggtcaacaaacataatcctggggacatactggccatcaggagagaggtgtttgtcagttgtttcataaaccagattgaggaggacaaactgctctgccaatttctggatttctttattttcagcaaacactttctttaaagcttgactgtgtgggcactcatccaagtgatgaataatcatcaagggtttgttgcttgtcttggatttatacctc

SEQ ID NO: 1477 - DNA, 427 bp, Homo sapiens
acagtttcagggcaagaaaacgaaatttgctagtgatgatgaacatgatgaacatgatgaaaatggtgcaactggacctgtgaaaagagcaagagaagaaacagacaaagaagaacctgcatccaaacaacagaaaacagaaaatggtgctggagaccagtagtttagtaaaccaattttttattcattttaaataggttttaaacgacttttgtttgcggggcttttaaaaggaaaaccgaattaggtccacttcaatgtccacctgtgagaaaggaaaaatttttttgttgtttaacttgtctttttgttatgcaaatgagatttctttgaatgtattgttctgtttgtgttatttcagatgattcaaatatcaaaaggaagattcttccattaaattgcctttgtaatatgagaatgtattagt

SEQ ID NO: 1478 - DNA, 561 bp, Homo sapiens
acagttgtttatatatttgtttcagggccgaaactgggatgaggcaaatgacaggatcattattactgacttttctttagccttgggctccaatgtggcctgatatggcaatattaaattttgtcttcatttaaaattttgatattttgttaatcatgaatcttttggaatcattcagttttttaaaatattatatttaagtatttttatgttaattacttagttttgagcacccccttaaatggtatgcccaaggttaagcaccagattttcttaactcacttcaccctaatctagtcctaatttgttgaatgaacagtgagttctccccaggttgactactgacttgcaaactgtaactaatgaccagagaagccagaaacatagggtcttagataattggagcttgagatgatcgactgtagtatccaatccaatggaacccagaagtaggcaaataaatatcagcaagttaaagagtgagctggcttttgacacctagtccatgctttcctatcctactgtcagaatgcttgtagaaacagagatgtgatattaaga

SEQ ID NO: 1479 - DNA, 516 bp, Homo sapiens
acttgcctcaggtccatatagctagagtggctttcaatctaccacaccacaaaacctatattctctgtattaccttccattgtcttgggttaaaaaaacaaaacaaaaatatttgagaagagagtgacagcaatgctaatatgtatatatatactgttttaccacactgataacttgagactagaaaaggtgctaatatttggtcagaattatcctattttacatgaaatataaatattttatttagatttatatatgaaattaaatttgtcttcaagacatcaagaatagactgatctaaaaaagtgtaaagtaatccacctacttcccatactcactgctagtatcatccaagccaccatatctcatccagatttctataccagcttcctaacttatctccctgtatccattcttgccctgtttgaatccattcatctcaccacagccagggtggtcctttaataaaaataaatctgatgatgttactctcctgctcacaggttcaaaacccgt

SEQ ID NO: 1480 - DNA, 356 bp, Homo sapiens
acttccaactctgggttggccccaaatccaactaatgccaccaccaaggcggctggtggtgccctgcagtcaacagccagtctcttcgtggtctcactctctcttctgcatctctactcttaagagactcaggccaagaaacgtcttctaaatttccccatcttctaaacccaatccaaatggcgtctggaagtccaatgtggcaaggaaaaacaggtcttcatcgaatctactaattccacaccttttattgacacagaaaatgttgagaatcccaaatttgattgatttgaagaacatgtgagaggtttgactagatgatggatgccaatattaaatctgctggagtttcatgt

SEQ ID NO: 1481 - DNA, 600 bp, Homo sapiens
  misc_feature 581: n = A,T,C or G
cgcatcctagccgccgactcacacaaggcagagttgccatggagaaaattccagtgtcagcattcttgctccttgtggccctctcctacactctggccagagataccacagtcaaacctggagccaaaaaggacacaaaggactctcgacccaaactgccccagaccctctccagaggttggggtgaccaactcatctggactcagacatatgaagaagctctatataaatccaagacaagcaacaaacccttgatgattattcatcacttggatgagtgcccacacagtcaagctttaaagaaagtgtttgctgaaaataaagaaatccagaaattggcagagcagtttgtcctcctcaatctggtttatgaaacaactgacaaacacctttctcctgatggccagtatgtccccaggattatgtttgttgacccatctctgacagttagagccgatatcactggaagatattcaaatcgtctctatgcttacgaacctgcagatacagctctgttgcttgacaacatgaagaaagctctcaagttgctgaagactgaaattgtaaagaaaaaaaatctncaagcccttctgtctgtca

SEQ ID NO: 1482 - DNA, 374 bp, Homo sapiens
gagcgcagaaggcaggactcgggacaatcttcatcatgacctgctcccctctcctcctcacccttctcattcactgcacagggtcctgggcccagtccatcttgacgcagccgccctcagtctctgcggccccaggacagaaggtctccatgtcctgctctggaagcgcctccaacattggaactaattatgtgtcgtggtatctacaattctcaggaacagcccccaaactcctcatttatcacaatgatggccgtccctcagaaattcctgaccgattctctgccaccaagtctggcacgtcagccgccctggccatcaccggactccggactggggacgaggccatctattactgcgcaacatgggatagt

SEQ ID NO: 1483 - DNA, 504 bp, Homo sapiens
acataatagaagggctgacggaaaaatcatcccagatcgtggacccttgggagaggttgtttaagattttgaatgttgttggaatgagatgtgaatggcagatggataaaggaagacgaagctatggagatattttgcatagaatgaaggatctctgcagatacatgaacaactttgatagtgaagcacatgcaaaatataaaaaccaagtggtgtattccaccatgctggtcttctttaagaatgcattccagtatgtcaacagcatacagccatctctcttccaaggtcctaatgccccgagccaagttccactggttcttcttgaagatgtatcgaatgtgtatggtgatgtagaaattgatcgtaataaacacatccataaaaagaggaaactagctgaaggaagagaaaaaaccatgagttcagacgatgaagactgttcggcgaaaggaagaaatcgtcacattgtagtcaataaagccgaacttgctaactccactg

SEQ ID NO: 1484 - DNA, 343 bp, Homo sapiens
  misc_feature 156: n = A,T,C or G
acttgtttttacatatatagcttatgtaatttctttatataaattaatgcttaataactgaaagcaagtgagctccaaagatgaaatttcagaaacagtatacatgaatgagtgtgttctactggtctgctaagagctttaaatggaagtggccgntcaaagcacagtgtcctgttaactcttgagtgctaagtagatctttgcaacagtaagcttgattgatcatgggttaaaaagagagaatattgaaatagatgttttaatacaggctggaaatcagctattcaacactatcattgatttagtatacaagaaatcatatggattaactgaacttaatagt

SEQ ID NO: 1485 - DNA, 342 bp, Homo sapiens
  misc_feature 52, 53: n = A,T,C or G
catgttttaagtagctacaggagctatagatttgaatctaatgttgcattanncttttcagttatcttctacctcctgtattttctactgtaataatgtaatttaaggccttccacaatgaacagttcactttattccctgggttttctataaacagttttaaggatatgatttggttaaaaaataatttgttataaaaattctgtttgcaaattaaactggaaaagtatccagagtctcaaaaggcaatgatttgtgagataatatggcatgcccggagccctgctcatcaatgaaaaacccatatgtaataatcgaattcatttaacatgaatcttgagt

SEQ ID NO: 1486 - DNA, 233 bp, Homo sapiens
acctttaccctcaggcaaggagcaatctcttctcttcctcttctaccttgctgtagcttctccccaaggatttatcacattctgccttgaatcatagggaacagcatgtgtagtggaatgaacacaggcctctgaatccaagatacgagtttaaatcccagctttggaggtggttacttaaagtctcagtgccttcattcttcttcctatataaagtagatattacacactat

SEQ ID NO: 1487 - DNA, 374 bp, Homo sapiens
acagatggcggccaagaaccccacacatccagctcgatgtcacaatatggggaacatctgacatcacccatcatggctgatcagcagcctccacaggtgggtctttcaggaggcaggaagtagagcgagggtccatggctgagtgcattatagtgatataaacatcatccatgtttggcatgacaaaaactttctgaaactcttgctccagtttcttctctatccagtctgtcacatgaactaaagtcacttctctctctccaagttttggccgagctttcagctccacatgtggtggctttcggaaaccataccatactcggtcagtcgggggtggtggaatgttgaccgccaaggttcctctacattcttgg

SEQ ID NO: 1488 - DNA, 76 bp, Homo sapiens
actgatgctgtcagtgtttaacactatgtttagctgtgtttatgctataaaagtgcaatattagacactagctagt

SEQ ID NO: 1489 - DNA, 302 bp, Homo sapiens
acaagtgaaggtgtcagtaaagaaatgcatcaccttcagcgcatgttcttacagaattgctgggaaattcctacttatggagcagcatttttcacaggacagatatttacaaaggcaagccccagcaatcataaagtcatccctgtgtatgtaggagtgaatataaaaggacttcatctcctcaacatggaaactaaggctttactcatcagtcttaagtatggttgttttatgtggcaattgggagatactgatacttgttttcagatccatagcatggaaaataaaatgagctttatagt

SEQ ID NO: 1490 - DNA, 383 bp, Homo sapiens
acagaactcagaggaaaaaagaaattaaattttagctttctggagagcagcccctctctggcaccatcaaacacttctttgtttcccttcaacttggaactcttcaaacatcaggggttgtgagggtttggccattcttttatcttgggtccgtgtgagtgacagaaatggtgcggcctgggaaagatctccctcctttacattttctcttctccctcctcctccttattctaaaactgtgcctccaacagaggggcaggggctcttgtagagagatccctggcccaggacaggagatgccaaatctaatttatctcactgagggcctttgagaaaaacgcttctgggccaggctcagtggctcatgcctatatagtcccagt

SEQ ID NO: 1491 - DNA, 223 bp, Homo sapiens
acccctttattgctcaaagaaagcaagccacaaacaataatgaagcaaaaaatggaatctaagaatctttttgtatggaatattacttctatcagaagatgatcaagatgtttcagtccagtgcacatcagcattgctgacattttatggattctaaacttgtgttgtttcttttttaaatcaactttttaaaaaaataaagtgtaaattaaccgactagagt

SEQ ID NO: 1492 - DNA, 523 bp, Homo sapiens
  misc_feature 213: n = A,T,C or G
acttaattactaagcactaactctgtgggctaggcactgtggaaacctaacaattcttgctttcaacatttttaaattctaataattggagagaagacgaaaggacacgaataaatacaaggcaaaaaggcatgctggaatacaatgactatatatgatcatataaaggtatttcaccggaaatccttagtgagcagatggtttaatttgtangaattccataaaagaaaaatgtttcttaacaattagtgaaacaacttacttgtgaatggtctgttttttttaaaggcaaccaacccataaagtgagacatagcaatgtttgtgcagcatactaatgttctaagtaagattttggtatttgacaataaatgaataaaaaccatgtatttttattttaaccattacaacaatacaattgcagatacttgtgtatttgttcaattagattaagaaattaaaaagaaaaaaatacaataaaaggggtaggcatcccatgacactgatttccaatgtggtacctc

SEQ ID NO: 1493 - DNA, 361 bp, Homo sapiens
actcttgtggggatgagactaagttaagttcacccaaagactctgtggtatttaagacgcagccttcctcattaaaaattaagaagtcaaaacgaagaaaagaggatggtgaacgttctcgctgcgtatactgccaggaaaggtttaatcatgaagaaaatgtcaggggaaaatgtcaggatgctccagaccctattaaaagatgcatatatcaagttagttgcatgctctgtgcagagagcatgttgtatcattgtatgtcagactcagagggagatttttctgatccctgttcgtgtgacactagcgacgacaagttctgcttgcgatggttagccctggtagctttgtctttcattgt

SEQ ID NO: 1494 - DNA, 440 bp, Homo sapiens
  misc_feature 127, 278, 410: n = A,T,C or G
actcctctctacccctaaggttgggctctgcctcagaggagtgagttttttttttttttctataaagtttacattgtcttactatttattgagttgaatttctggtcattgcctatgcaaatataanaaatctggctttaaatattagtcagtttcatggctatgactagattgttttcttgtataactaaatacctgtataaaatgaactaatgttttctctcccctccctaccccttccttatgaacaatgctttaggtatattgaaatctttaanagcagtagagctgaagttagaactcattatgatccaccacgaaagcttatggccatgcagcggccaggtccttatgacagacctggggctggtagagggtataacagcattggcagaggagctggctttganaggatgaggcgtggtgcttatggtggaggt

SEQ ID NO: 1495 - DNA, 407 bp, Homo sapiens
  misc_feature 142, 143, 157, 166, 174, 175, 184, 201, 231, 250, 254, 264,269, 271, 314, 316, 326, 327, 347, 348, 372, 376: n = A,T,C or G
caagcttttttttttttttttttttttttaagaggaaaacccggtaatgatgtcggggttgagggataggaggagaatgggggataggtgtatgaacatgagggtgttttctcgtgtgaatgagggttttatgttgttaatnnggtgggtgagtganccccattgngttgtggnnaatatgtanagggagtatagggctgngactagtatgttgagtcctgtaagtagganagtgatatttgatcagganaacntggttactancacananagttctcccagtaggttaatagtggggggtaaggcgaggttancnaggcttgctnnaagtcatcaaaaagctattnncgggagcagagtttgaagtccttnaganaggattatgatgcgactgtgagtgcgttcgt

SEQ ID NO: 1496 - DNA, 212 bp, Homo sapiens
catataaatagaatcatggaagctttttatattacctgttttatggccttatagaattaatgaaccaaatgaaaactgaatctccattccacaatcccatcctttatttctattcttattttcaaggtagtattaagtgtccatatttctcaagccacattcaaggaaatcatgtcttaactattttggatgttgcctctccttcatcgtgt

SEQ ID NO: 1497 - DNA, 188 bp, Homo sapiens
aacacagcaagcctggatctgtgccacttgtgtcagagaagaagaaacacgtagtggcagttgtaaaataattggtattcctaacaatcctgatgtataattatttgttacttttgatttgagaactctacaaataaaagtgctgggactagattaattgcaaaaaaaaaaaaaaaaaaaaaaaaaaa

SEQ ID NO: 1498 - DNA, 324 bp, Homo sapiens
  misc_feature 295, 309, 313: n = A,T,C or G
actttgcccgaatgtgctccttgatgttaagtaaggaattgccagcaaggattcgtttcctgctgcaggataccgtagagttgcgagaacaccattgggttcctcgcaaggcttttcttgacaatggaccaaagacgatcaatcaaattcgtcaagatgcagtaaaagatctaggggtgtttattcctgctcctatggctcaagggatgagaagtgacttctttctggagggaccgtccatgccacccaggatgaaaatggatagggacccacttggaggacttgctgatatgtntggacaaatgccangtangcggaattggt

SEQ ID NO: 1499 - DNA, 282 bp, Homo sapiens
acgttgtatggtttgttttttttttttaaccaagatttaaattaaaaaaaatttgagaacacataatagaagaaaattgtgagaatggggtggtcaatatgtgaggggcatacacacaccaaggtcagatttggcattaggggtttatgggtagtttcggagagagccatttgagcagaaaggtggggaaagaagctagacctcaggggattggagagagctcaggcgacactggagggaggtgggggcagccagaatggactcactcctatgtttggtggt

SEQ ID NO: 1500 - DNA, 470 bp, Homo sapiens
acctttgagtcattaaaatgtcttaaaagataacagcttgttaccagaacattagaaaccatagccatgattctcaagcgttaacaatctacatttgatattttcttggccactgcattcttcaatgaataataatttccagaattccattccatgttgttttccaatagatcttttcacactcgatgttgaatacatggctctttgcagatgaataaaacaagtgcattcagtttagagatccattttgcgaaggctcattcgactgaaggaatctctgtggcaggtgacaggcaatactgccttgtataactgagggatctttctgttgatcagtggctgtagggcctctttaaggcgatgatagtttctctccagttccctttgatactccttttgatccggcccaattaagctcttattttttcttaaggcatcttcacaccttttagtaaaatctttaaggcgat

SEQ ID NO: 1501 - DNA, 417 bp, Homo sapiens
acctgctggggtcatcgggagacttgaagtccaggtcatacttcccagacctgaagaactcggaggccgctacgtccatgccgatgaccaccttatcagtgtagccagctttcccaatagcagtcttcagcagctccaggccttctttattctccaggatgttgggagcaaacccgccttcatcccccacattggtggcatctttcccatatttctccttgatgacattcttcaggttgtggtaaacctctgctccaatgcgcatggcttccctgaagtttgctgcaccgactgggaggatcatgaactcctgcatggccagcttgttgccagcatgagaaccgccattgatgacattgaacgccgggactggcaggatgacttcagagttgccagccaagtcagcgatgtggcggt

SEQ ID NO: 1502 - DNA, 233 bp, Homo sapiens
acaaaaaaaaccttacataaattaagaatgaatacatttacaggcgtaaatgcaaaccgcttccaactcaaagcaagtaacagcccacggtgttctggccaaagacatcagctaagaaaggaaactgggtcctacggcttggactttccaaccctgacagacccgcaagacaaaacaactggttcttgccagcctctagagaaatcccagaacactcagccctgacacgttaa

SEQ ID NO: 1503 - DNA, 492 bp, Homo sapiens
  misc_feature 460, 473: n = A,T,C or G
acaatgttatgtcgggaacacgtgctgctaactcactggtgagttcaatggcaacgcttcattcgggaggctgttctgctttacgcatctgagaactacataggagagcaagtgtctgcacctcctaactgcagaagctaccgtcttctcaaagacgaaggtctttgcaaagttcagtgctcggtgttctcggcacaacaatgcagtgtagttcagaaggtattttggcaactcttaatctgaacaagaatggggggggcgcttttgaaaaataaggctttaagaaggcttgtcattttagggctaaattttaatagaatgtgagtctgaactcttacatttagaacaaacaaaaccttaaaattactgattggttcaaaaaatggttttatggaaaaattaatctgtaacaaaaagttggcattgagtgcgaaggttccaccgttgtttttttttttgntttttttttttgnttttttttgagcaaagcgt

SEQ ID NO: 1504 - DNA, 413 bp, Homo sapiens
  misc_feature 163, 210, 376: n = A,T,C or G
acaataacctctaaaatatttgaagattatgacatataatatgatgaggattacatatgaaactattataagtagtagtaattattattccatataatactaattatacttggtcatttttccccctgaattgtttccccaggaattctttctgcttgttaantttgctgtgtatttttcatgttgctcttttccttaaatatttgctgnttctcatttgtctacttgcaaatgagagcctaggagtcaacaaactttttatataaagggtaggctttaaggcccaaacacagtatctgtcatatattgttttggtgttctacaaccctttaaaaatgtaaaatctactaagaaataggtagtggaaggcctgtanatagcagttttccaaccaataaatttctcagtatcat

SEQ ID NO: 1505 - DNA, 464 bp, Homo sapiens
acactgatctgagatcgcaccactgcactccggcctgggcgacaaagtgagactgtctaaaaaataataataataaaaagcattttgaaattagtcgtggtcaatgcaattctactctttggaatccgtttagctaaatgaatgtagtgctcttgttgaatggaaacaggtgataggaaatgcctaccatttgactcaatatggataatcaagagttgctcaggatgcttggatctgggggtagattctcattcatcattgccctggcacatgtcaattactacataaaaggtcaaatgcaatgtcaaatccaaagcctcaggaggaaagtgagttcagttcccaagagaacagcaatagctcaacaatgtaaaacttcatctagagtatatcggcattaaattagtgctgtcgaaacaatacgttgaggaattacagtaacacctggaagttccttctcatgt

SEQ ID NO: 1506 - DNA, 542 bp, Homo sapiens
  misc_feature 9, 10, 538: n = A,T,C or G
acccagtanntcttcttcaaggaaaaattctcaggggagtaacagaagcctggatacaattactctatcaggagatgaaagggactttgggagactgaatgtgaaattgttttataattcttcagtagaacagatctggatcacagttttacagtgcagagatttaagttggccctctagttatggagacactcctactgtttctataaaaggaatacttacattgcccaaaccagtgcatttcaaatcttcagccaaggaaggttccaacgctattgaatttatggaaacgtttgtatttgctattaaacttcaaaatctacaaactgtaagacttgtatttaagattcaaacccagactcccaggaagaaaaccattggagaatgctcaatgtcactcagaacccttagcacacaggaaatggattactctttggatataacaccaccttcaaaaatttctgtttgccatgcagaacttgaattggggacttgttttcaagcagtaaatagcagaattcagttacaaattcttgangcac

SEQ ID NO: 1507 - DNA, 469 bp, Homo sapiens
acacaaatgtttatttctcaattaaacattccctttaaacacaaggaatgagttctaaatcttcataaagatgaattaaaaatgaaatccctccagtatagtgtatataatcactgtgttcttggtcactactggcatttactgtttaacatcaaaaacaaagacaggtcatttaaaaatcatgctactggatttctagctcttcctctatgaccagttctacactgatctgcaatgtttaaaagtttacatcaccaaatcaaagcaagtttaaggtgtgaagtagctgtgcattaaacacaaaataaacaataaaattataagatatagtcaagttcataacgaatataggtgttcttatctacattggttcccaggacgctctcatagcacattacccaagaatctacaacgatgataagaacacctatattcgttatagattcttgggtaatgtgctatgagagcg

SEQ ID NO: 1508 - DNA, 255 bp, Homo sapiens
acaatgaattccttgatttttcaaggctgaccctgtttccttggttaacaatttcaatttaggccttataggaaaaaacgtaagggatcctttatctgcctccaactaggtaagttatttgataccactgacagcttaaaaagtaatgtcctaacctttctgaagattctggttgccataaccatgctactacagtctgttgttagtttgctctattaaaactaattggtctggagaaaacctacctgcagttgt

SEQ ID NO: 1509 - DNA, 474 bp, Homo sapiens
  misc_feature 109, 116, 125, 235, 242, 269, 300, 307, 359, 408, 455: n = A,T,C or G
acaagctttttttttttttttttttttttttttttaatcatatttgatagcagctttttttattggttacaaaacctaagcccatatacaaaattaggaacacatttanatgcctnttttgaaanaacgttttagtctttttaaactgagtttaaaaaaaaataacaatgcaatttttaaacactgttttgaaaacttaaaagtgcagcaatatacctagtttcctttatctacnaaatggngcaattccaattcaaaactggtaaggncacaaattgaatcaaggaaatgcatacaagngtctgcnctacttgatgctaatgttcacttaaatgttagtttgcactttaaaacatganaggaaataggaatcatcacagtagaggcccaattttaatcataatgggngcaaattttaaaaggtaactgtcagttaagtaaggaaagtccagaanaaactaaactggaaggggt

SEQ ID NO: 1510 - DNA, 326 bp, Homo sapiens
actcatgattggctttaatatttctttacactatacatactgaaaatgtttacatttactaataaggaatgccaagcgtatccatcaccatttgaatagcttgcaggggatttgtgatttcttccatgttatctcttctcaaaacccaatctggcttaagtcttgaaactattctggtccttacaggtgtttctgggataaaaggaatgcttatagaagaattcttcttttgcttgtaaagtattctttcagtattcattttatgtttatgagctgtaagtttgtagagactgtaaatacggtcaacaactttggacctacttcgt

SEQ ID NO: 1511 - DNA, 227 bp, Homo sapiens
cttctatggtggatggtttgaaaccaggtcagagaaaggttttgtttacttgcttcaaacggaatgacaagcgagaagtaaaggttgcccaattagctggatcagtggctgaaatgtcttcttatcatcatggtgagatgtcactaatgatgaccattatcaatttggctcagaattttgtgggtagcaataatctaaacctcttgcagcccattggtcagtttggt

SEQ ID NO: 1512 - DNA, 357 bp, Homo sapiens
accattcagttcagctgcaggtataggcagtgacaagtatctaattcttagaagaatcacttactcccacaatctgtccagacacattaatctaaggacaagtttataaatagcaaacgtgattttcacattgcagtgttctcaagaatgtatatacaagtgtgtagtcctgttgatgggatgtttccccgagttctttctattgatgcgttcatgctcttgaccctggtagagacagttctttctttccacagagcagattttcttttgtcatccaccatttacaatactctgtgaattagtattacttattacatttatgaaacggcaatatttggattgtaatagctcttcagt

SEQ ID NO: 1513 - DNA, 370 bp, Homo sapiens
acatgggtgaattttatatgtgatttttgttttgttttgttttgttcagattaactgcttatagccttagaaagccttttacaaaattaaaaaaaaaatagatgtgcattcagtttttaagaatggaatcatccaaaggaattccttttttgaggtttggatgttgcagctagtaaaggatatttttgctctgttcagcagttctaaaaattgctgaagtaggggccaggtcactggtagttatagtatggaatgggagaagtgaaagttcagttatagaactttccatacttccaagtttactgcaagtttttatgcttgagagagatgctttctaatataagactgatgtgttgattttactgattgt

SEQ ID NO: 1514 - DNA, 289 bp, Homo sapiens
caagtctgtggcttggtgagtctgtgtggccagcagcctctgatctgtgcagggtattaacgtgtcagggctgagtgttctgggatttctctagaggctggcaagaaccagttgttttgtcttgcgggtctgtcagggttggaaagtccaagccgtaggacccagtttcctttcttagctgatgtctttggccagaacaccgtgggctgttacttgctttgagttggaagcggtttgcatttacgcctgtaaatgtattcattcttaatttatgtaaggttttttttgt

SEQ ID NO: 1515 - DNA, 200 bp, Homo sapiens
acagaattgtccatgtgctccaggactagttgggctatgacagacaccacagattgctctgcaacttccggggaacattatctgagtcacatgcttctctggtcatgtttttccaacatcaaaatgaaacacttttctccatggaatgtggagtgacaaattatctcaaaccaaagtcatccttcatcatgacggcatgt

SEQ ID NO: 1516 - DNA, 567 bp, Homo sapiens
  misc_feature 551: n = A,T,C or G
acgatcgaagggactacgtcttcattgaattttgtgttgaagacagtaaggatgttaatgtaaattttgaaaaatccaaacttacattcagttgtctcggaggaagtgataattttaagcatttaaatgaaattgatctttttcactgtattgatccaaatgattccaagcataaaagaacggacagatcaattttatgttgtttacgaaaaggagaatctggccagtcatggccaaggttaacaaaagaaagggcaaagcttaattggcttagtgtcgacttcaataattggaaagactgggaagatgattcagatgaagacatgtctaattttgatcgtttctctgagatgatgaacaacatgggtggtgatgaggatgtagatttaccagaagtagatggagcagatgatgattcacaagacagtgatgatgaaaaaatgccagatctggagtaaggaatattgtcatcacctggattttgagaaagaaaaataacttctctgcaagatttcataattgagagaattcctgagttgatagctctaaangcagatatgctgtatt

SEQ ID NO: 1517 - DNA, 411 bp, Homo sapiens
  misc_feature 327, 399: n = A,T,C or G
cccccagctggctagagatttatttgttgtaaatgctgtatagatttggttttcctttctttacttaccctggtttggatttttttttttttttttgaatggatttatgctgtcttagcaatatgacaataatcctctgtagcttgagctacccctcccctgctgtaacttacgtgacctgtgctgtcactgggcataggacagcggcatcacggttgcattcccattggactcatgcacctcccggatggtttttgtttttttcgggggttctttggggtttgtttgtttgcttcttttccagagtgtggaaagtctacagtgcanaaaggcttgaacctgccagctgatttgaaatactttcccctgcgcagggccgtatgcatcctgccaagctgngttatattctgt

SEQ ID NO: 1518 - DNA, 532 bp, Homo sapiens
  misc_feature 506, 516: n = A,T,C or G
accctctcttccagcacccaggccagtattgagatcgattctctctatgaaggaatcgacttctatacctccattacccgtgcccgatttgaagaactgaatgctgacctgttccgtggcaccctggacccagtagagaaagcccttcgagatgccaaactagacaagtcacagattcatgatattgtcctggttggtggttctactcgtatccccaagattcagaagcttctccaagacttcttcaatggaaaagaactgaataagagcatcaaccctatgaagctgttgcttatggtgcagctgtccaggcagccatcttgtctggagacaagtctgagaatgttcaagatttgctgctcttggatgtcactcctctttcccttggtattgaaactgctggtggagtcatgactgtcctcatcaagcgtaataccaccattcctaccaagcagacacagaccttcactacctattctgacaaccagcctggtgtgcttattcangtttatgaangcgagcgtgccatgac

SEQ ID NO: 1519 - DNA, 501 bp, Homo sapiens
gcggccgactcgcaagatggcgccgcagaaagacaggaagcccaagaggtcaacctggaggtttaatttggaccttactcatccagtagaagatggaatttttgattctggaaattttgagcaatttctacgggagaaggttaaagtcaatggcaaaactggaaatctcgggaatgttgttcacattgaacgcttcaagaataaaatcacagttgtttctgagaaacagttctctaaaaggtatttgaaataccttaccaagaaataccttaagaagaacaatcttcgtgattggcttcgagtggttgcatctgacaaggagacctacgaacttcgttacttccagattagtcaagatgaagatgaatcagagtcggaggactaggcaaaggctccccttacagggctttgcttattaataaaataaatgaagtatacatgagaaataccaagaaattggcttttagtttatcagtgaataaaaaatattatactctcgaa

SEQ ID NO: 1520 - DNA, 406 bp, Homo sapiens
ctcctgacatagccagctgctgtgaaataatggaagagcttacaacctgccttaaaaattaccgaaaaaccttaatacactgctatggaggacttgggagatcttgtcttgtagctgcttgtctcctactatacctgtctgacacaatatcaccagagcaagccatagacagcctgcgagacctaagaggatccggggcaatacagaccatcaagcaatacaattatcttcatgagtttcgggacaaattagctgcacatctatcatcaagagattcacaatcaagatctgtatcaagataaaggaattcaaatagcatatatatgaccatgtctgaaatgtcagttctctagcataatttgtattgaaatgaaaccaccagtgttatcaacttgaatgtaaatgt

SEQ ID NO: 1521 - DNA, 435 bp, Homo sapiens
actttacccttcaacgggacaagaaactgcaccagaagtcaacttcacatttgaaggagaaactggaaagaatccagatgaagaagacaacacattttatcaaagacttaagtccatgaaggaaccgctagaagcacaaaatattccagacaattttggaaatgtatctccagaaatgacgctcgttctacatttagcctgggttgcctgtggttatataatatggcaaaattctactgaagacacatggtataaaatggtaaaaattcaaactgtcaagcaagtgcaaagaaatgatgactttattgaattagactacaccattctacttcataatatagcatctcaggagattattccctggcaaatgcaagttctctggcatccacaatacggcactaaagtaaaacataatagccgtctgccaaaggaagt

SEQ ID NO: 1522 - DNA, 245 bp, Homo sapiens
acaatgacggggaggaagagggttggttaaagcatccctctaagcagttttctgctgtcccttctttccaatcagagatttgtggatgtgagggatcacaccacccccagctatggtagccttgataagagaatccaactcttcatcaccacggattgcaagctgcaagtgacgcggagtgatacgctttactttgagatccttagaagcattacctgccagctccagcacctctgcagtgaggt

SEQ ID NO: 1523 - DNA, 272 bp, Homo sapiens
acatggcaaaaccaacaatgctgtgtccttccggagtccagtgctctttcggcacttctgcaaccaggcagtggtaaaaggggtgctctccaaaaccatcttctagcagatctttttcagttaagattacttgttcttccatgtattcatatttagccagctccttgatcagccgcagtatgtcactgcagtcggcggcagtggctgggcggatcacgaatttagccattttcgtcttttgcttttcttccctttgcggaccaggcccctgt

SEQ ID NO: 1524 - DNA, 289 bp, Homo sapiens
gaggaaggtgggtctgaatctagcaccatgacggaactagagacagtcatgggcatgatcatagacgtcttttcccgatattcgggcagcgagggcagcacgcagaccctgaccaagggggagctcaaggtgctgatggagaaggagctaccaggcttcctgcagagtggaaaagacagggatgccgtggataaattgctcaaggacctggacgccaatggagatgcccaggtggacttcagtgagttcatcgtgttcgtggctgcaatcacgtctgcctgtcacaagt

SEQ ID NO: 1525 - DNA, 543 bp, Homo sapiens
  misc_feature 445, 464, 470, 476, 489, 527, 532: n = A,T,C or G
accaaagcttacatttgtaaataactataaactgcaatattttacaggaaaaaagaaatagcatttttacacatttttaaataatagcttgcatacttttttttttgccgaaagtggcatttttcagcatccagagggtttgggcatagtggcgagtggggtatctgttgttgttgttttttgttttagacatgtagaggtgtggcttccgaaccccgtgagtcctagacagctttctatcttcccacagctgcatgcatgtttcctcacaaaccagttctgcatataaaagctcattttttaattattaaataagttttgtgtctgacacagcttttgatctgaatgaaatgcctttaagcctttttttcttctttttttttttcaagtgaaaggcacagaaatgcaattacagtcctcaaagggttaaatttgacactaccangttctatgacctttattgncatggnaacttnaccattttagganggctttttatcattggtatttggggctttctttactgntaaanaatgtctctga

SEQ ID NO: 1526 - DNA, 351 bp, Homo sapiens
accaaatttaacttggcaaactttctattgcctgtcccatgtgcatcttatttaaaatttcccccatggaaatcactctcctgttgactatttccagagctctaggtgtttaggcagcgtgtggtgtctgagaggccatagcgccatcatgggctgatttttattaccaggtcccccagaagcaggtgggaggctctgcttcctgctgccgctctgcagcctggacctgtggaccctggttgtaaagagtaaattgtatcttaggaaaccagtgtcaccttttttttcaccttttaattttatattatttgcgtcatacatttcctgtaacggaagtgttaattttactgt

SEQ ID NO: 1527 - DNA, 466 bp, Homo sapiens
acaataaaactgttgtcagcttttgttttacagagaacgctagatattaagaattttgaaatggatcatttctacttgctgtgcattttaaccaataatctgatgaatatagaaaaaaatgatccaaaatatggatatgattggatgtatgtaacacatacatggagtatggaggaaattttctgaaaaatacatttagattagtttagtttgagggagaggtgggctgatggctgagttgtatgttactaacttggccctgactggttgtgcaaccattgcttcatttctttgcaaaatgtagttaagatatactttattctaatgaaggccttttaaatttgtccactgcattcttggtatttcactacttcaagtcagtcagaacttcgtagaccgacctgaagtttctttttgaatacttgtttctttagcactttgaagatagaaaaaccactttttaagt

SEQ ID NO: 1528 - DNA, 213 bp, Homo sapiens; identical to SEQ ID NO: 1431

SEQ ID NO: 1529 - DNA, 321 bp, Homo sapiens
actgaatacttcggcaaacttattgggtcttcattttctgacagacaggatttgactcaatatttgtagagcttgcgtagaatggattacatggtagtgatgcactggtagaaatggtttttagttattgactcagaattcatctcaggatgaatcttttatgtctttttattgtaagcatatctgaatttactttataaagatggttttagaaagctttgtctaaaaatttggcctaggaatggtaacttcattttcagttgccaaggggtagaaaaataatatgtgtgttgttatgtttatgttaacatattattaggt

SEQ ID NO: 1530 - DNA, 257 bp, Homo sapiens
actcgatgtttttaaatgtatttctaataattattagtagggtcacacctatttgacagcttttttaaaaagtcacatattgctgtatttttaaagatgacaaacctttatttaaatgagatgcttgctggagattttctttttcaaactcactttttaagttatggaaataatatcactgctgaaagtttggaaaacatatataagggtgccaaaaataccactaaaatcacataaaccaatcttaccattattaa

SEQ ID NO: 1531 - DNA, 96 bp, Homo sapiens
accagttaacaagctcgctcctctttaatgctgactcgtcctcttcttcttccacctttctgaggtgaagcacaataaggttagagattcggcagt

SEQ ID NO: 1532 - DNA, 293 bp, Homo sapiens
accattatggtttccatatggtaattacattggaaagttctgcaataagattctagttctctcttttctttaagcttatggttgaaggttaaccttgtttgtgcagattaccaaattactgctgatgtagtatgataaagtcagcttcttggatacagacacacccagggcagctgccaatcagaaatgcaaattgctaaattccaaacagaaccagtgactttgctgctacatatttactaaattgaccactttgattcttgcttgtttgtctcagttatagggagttttgt

SEQ ID NO: 1533 - DNA, 421 bp, Homo sapiens; identical to SEQ ID NO: 1179

SEQ ID NO: 1534 - DNA, 572 bp, Homo sapiens
  misc_feature 112, 182, 186, 193, 249, 547: n = A,T,C or G
actgttcctgttggccgagtggagactggtgttctcaaacccggtatggtggtcacctttgctccagtcaacgttacaacggaagtaaaatctgtcgaaatgcaccatgaanctttgagtgaagctcttcctggggacaatgtgggcttcaatgtcaagaatgtgtctgtcaaggatgttcntcgnggcaacnttgctggtgacagcaaaaatgacccaccaatggaagcagctggcttcactgctcangtgattatcctgaaccatccaggccaaataagcgccggctatgcccctgtattggattgccacacggctcacattgcatgcaagtttgctgagctgaaggaaaagattgatcgccgttctggtaaaaagctggaagatggccctaaattcttgaagtctggtgatgctgccattgttgatatggttcctggcaagcccatgtgtgttgagagcttctcagactatccacctttgggtcgctttgctgtttcgtgatatgagacagacagttgcggtgggtgtcatcaaagcagttggnacaagaaggctgctggagctggcaa

SEQ ID NO: 1535 - DNA, 306 bp, Homo sapiens
acctgcgtttcctgcgctctgcggagttcttcaactacactgtgcggaccctgggcctgggagaggagtggcgagggggtgatgtggctcgaacagttggtggaggacagaaggtccggtggttaaagaaggaaatggagaaatacgctgaccgggaggatatgatcatcatgtttgtggatagctacgacgtgattctggccggcagccccacagagctgctgaagaagttcgtccagagtggcagccgcctgctcttctctgcagagagcttctgctggcccgagtgggggctggcggagcagt

SEQ ID NO: 1536 - DNA, 547 bp, Homo sapiens
  misc_feature 485, 500, 543: n = A,T,C or G
acaaaatgaaatagacagacttaatgaacaagccagtgaggagattttgaaagtagaacagaaatataacaaactccgccaaccattttttcagaagaggtcagaattgatcgccaaaatcccaaatttttgggtaacaacatttgtcaaccatccacaagtgtctgcactgcttggggaggaagatgaagaggcactgcattatttgaccagagttgaagtgacagaatttgaagatattaaatcaggttacagaatagatttttattttgatgaaaatccttactttgaaaataaagttctctccaaagaatttcatctgaatgagagtggtgatccatcttcgaagtccaccgaaatcaaatggaaatctggaaaggatttgacgaaacgttcgagtcaaacgcagaataaagccagcaggaagaggcagcatgaggaaccagagagcttctttacctggtttactgaccattctgatgcangtgctgatgagttangagaggtcatcaaagatgatatttggccaaacccattacagtncctc

SEQ ID NO: 1537 - DNA, 270 bp, Homo sapiens
  misc_feature 15, 16: n = A,T,C or G
acaatgctaattaanncccaatctacaggtttaccacctttgtgggctaattagcttccaatagaggagaatctcatgtttccatagctataaagtgcaccccttatccctgcgaacctcttcacaaatgtgctgttggtcataagggggacagtttgagactatggagtgctccatgaatagaaaagcagttcaaagcacgtgtctcacactcacggagtcagcactgcctccttcacatacgaggaacagtgtagtcattcttaatgt

SEQ ID NO: 1538 - DNA, 210 bp, Homo sapiens
acgtgccaagcatcctcgtgcgaccgcgagagcccggggagcgggggcttgccggccgtcgcactcatttacccggggacagggagaggctcttctgcgtgtagtggttgtgcagagcctcatgcatcacggagcatgagaagacgttcccctgctgccacctgctcttgtccacggtgagcttgctgtagaggaagaaggagccgtcgg

SEQ ID NO: 1539 - DNA, 232 bp, Homo sapiens
acgcaatcttaaagagggagtaaggacaggaattcagggcagggctctggcagttacggtcaactaagttgtagaggtttcagcgactgcggtcagatagacattagacgtcgtcagttatcgcttctgacggcacttcccagttctctcgggtttgcacacccccactgtgggccggggaaccgggtcccggccttcgcagactccaggctctggcagatgtggccctcca

SEQ ID NO: 1540 - DNA, 581 bp, Homo sapiens
  misc_feature 522: n = A,T,C or G
actcttgtccacagcagagacattgagtataccattggcatcaatgtcaaaagtgacttcaatctgaggaacacctcggggtgcaggaggtatgcctgtgagttcaaacttgccaagcaggttgttatcctttgtcatggcacgctcgtcttcataaacctgaataagcacaccaggctggttgtcagaataggtagtgaaggtctgtgtctgcttggtaggaatggtggtattacgcttgatgaggacagtcatgactccaccagcagtttcaataccaagggaaagaggagtgacatccaagagcagcaaatcttgaacattctcagacttgtctccagacaagatggctgcctggacagctgcaccataagcaacagcttcatcagggttgatgctcttattcagttcttttccattgaagaagtcttggagaagcttctgaatcttggggatacgagtagaaccaccaaccaggacaatatcatgaatctgtgacttgtctagtttggcatctcgaanggctttctctactgggtccagggtgccacggaacaggtcagcattcagttcttcaaatc

SEQ ID NO: 1541 - DNA, 333 bp, Homo sapiens
  misc_feature 45, 47, 90, 170, 171, 264: n = A,T,C or G
acgtatgtggcatttccaggtatgactgagtgtgagagacatgtnanaggctcttcagtgatttcttgctattgaccgatgcttcactgngccaaaagagagaaaaaaatgttgggttttgtaattaaattatttatatatttttgaaacccgaattgaaaatgttgcanncaacgggctacagctttattagtggttctctaactgtggtctccttgggccaagcaatttctttaaaggaaaagttgattatgtatgtggggngccaggaccactgccttgaaagcaagtgtgatttttatttttaatattattttatttgtgtctgtgtac

SEQ ID NO: 1542 - DNA, 136 bp, Homo sapiens
accttagagttcctggccagagttgactctaggtagtgatgtgattttcttgggatgtttttctaaatattcttttatgctaaagcacatggcttgatacttctgttgattaagctcgtgtctacttacagtcatc

SEQ ID NO: 1543 - DNA, 401 bp, Homo sapiens
acatattaagataaatgtcatgtgtaagataactgataaatattggaactttgctagaacaagaccctgtagtaatagtaataatagttgaagtttggccaactcttaataaagttattttggtaactaatgttttatggcacttaagaataattagcagcgttaaattttgtttgtattaagcacttttaattttatccttcctaaaaatagtttattgtatctgacaagaaacttacttaaccattgtgtccttcccatcttttttgtcatctttgttttcttcaaatgccctcctcccatctgccttgagattccctcgtcttcacttaaaagccagagtgcaagtcatgatttgcgggagggctcttgaaccacttctggctgcaccacaattctgt

SEQ ID NO: 1544 - DNA, 291 bp, Homo sapiens
acatcggtctggccgggctcgccactgacgtccagacagttgcccagcgcctcaagttccggctgaacctgtatgagttgaaggaaggtcggcagatcaaaccttataccctcatgagcatggtggccaacctcttgtatgagaaacggtttggcccttactacactgagccagtcattgccgggttggacccgaagacctttaagcccttcatttgctctctagacctcatcggctgccccatggtgactgatgactttgtggtcagtggcacctgcgccgaacaaatgt

SEQ ID NO: 1545 - DNA, 259 bp, Homo sapiens
  misc_feature 220: n = A,T,C or G
gaaataccttaggccttcagtcaattccgaagctccttcagttgtttttataatgggcgttttcacatgcacatatgtgtatgcatgtatacgcccatacagacatgcacacacagactcctactccattagctaacataccctccctctccacaacccctgtcacatacctttcaggaggtgacagttgtcttagttgtcatctacccagacaaacgtnctgggcccgtcctccctcctgatactgtagcctcttggt

SEQ ID NO: 1546 - DNA, 412 bp, Homo sapiens
acacagtcaagctttaaagaaagtgtttgctgaaaataaagaaatccagaaattggcagagcagtttgtcctcctcaatctggtttatgaaacaactgacaaacacctttctcctgatggccagtatgtccccaggattatgtttgttgacccatctctgacagttagagccgatatcactggaagatattcaaatcgtctctatgcttacgaacctgcagatacagctctgttgcttgacaacatgaagaaagctctcaagttgctgaagactgaattgtaaagaaaaaaaatctccaagcccttctgtctgtcaggccttgagacttgaaaccagaagaagtgtgagaagactggctagtgtggaagcatagtgaacacactgattaggttatggtttaatgttacaaca

SEQ ID NO: 1547 - DNA, 204 bp, Homo sapiens
cctttaggaccttgacagacaaatcgattacaaggtcaattcccaggatttcttcagggtgtgttcaggagtgtagatgttctttggatgacctttctactaaattagacctctgaaggagaaagctacttgccagaggctttccctgagagcattaggttggacaaaatctgactaaaatttaattactaaatgaaagtgtgt

SEQ ID NO: 1548 - DNA, 474 bp, Homo sapiens
acttatttcaacaattcttagagatgctagctagtgttgaagctaaaaatagctttatttatgctgaattgtgatttttttatgccaaaatttttttagttctaatcattgatgatagcttggaaataaataattatgccatggcatttgacagttcattattcctataagaattaaattgagtttagagagaatggtggtgttgagctgattattaacagttactgaaatcaaatatttatttgttacattattccatttgtattttaggtttccttttacattctttttatatgcattctgacattacatatttttttaagactatggaaataatttaaagatttaagctctggtggatgattatctgctaagtaagtctgaaaatgtaatattttgataatactgtaatatacctgtcacacaaatgcttttctaatgtttttaaccttgagtattgcagttgctgctttg

SEQ ID NO: 1549 - DNA, 394 bp, Homo sapiens
acgcgaaattgtgttatgactgatagccttcagctacaaaaagataggactgacctggtttaaagtgttctattttgtaaatcattccatttgagtctttctgatgaacttggctatactgaaatctgttattttagtgaggctccaaaatgagcaaagctaggcctgattagagtagagtgactattaaaaaacataactttctaggagctataaatcaaagttttaaaaagatgtttggatatatttgagtattccgatcatgaaaacagaaattgccctgcctactacaaggacagactgatgggaaattatgcacctggtcaacttagcttttaagcagacgatgctgtaaaaactaacggcttctctgatatttattgtaagttttagt

SEQ ID NO: 1550 - DNA, 572 bp, Homo sapiens
  misc_feature 563: n = A,T,C or G
acagttaattagctcctgaagacaagttagtccaacctcaaagcacaggaagttgcacagcaggtgggggaaaacccagctactcacagttgtccacaaggggttagtggcctgaggtggtccttaggcaggagccacctgtcccacccattcacttgtcctgcctggccctagccctgaacaactgcaatgcagcacctctggaagtggcacattttatttcttttctaaacgctgagttgtcagggataaattttcaatagaaaaatctttcccacctgctgataatactttggtttttttgttttcctaaagataaagcctggagtcagcaaaatttgcttgcatgataagctagttgctttggaacaaacagaaggttgccgggtatttcttggagtagaattttgtagcctgccagactgagtttctcactggcatcaaacacacacttcatcataagggcggcaaagcccaagaattgaaacccacttgactggaaataccaggacccgaaggtggagagccaccctggaggaccacgtggtctgcaatgagctctncagtcaccc

SEQ ID NO: 1551 - DNA, 517 bp, Homo sapiens
  misc_feature 145, 274, 308, 330, 331: n = A,T,C or G
accacgaagtcaatacttctcagtgagtagggaaggcaaaatacttcctcaatagcagggaaaaaaaagcaagagaaagactgaatttagaaaaaaaagacaactgttaaagaaaatgtttaagtcaacttttttttttttttanacaaggatattgcaactatcacttaaagtctggtggcacattctttagtaggtccttaaggcaatatatttaaattaatttacaatttgatttgatgttaaagtttttttaaacatcacctcaaaatanatgctcaaaataatgccctcacaatagcctttgntaaaatgtattcagaatgtttnntaaaaaataatgggtggctttatattacagtagtgctcattagcaccactataattaagggtctaccaagtttccagcaaaaccacctgtttcttaggagtttcaccataaaagatcacattggctttaaccagttgggtagcgcacaaaaaagcaatttttatcagttgctggtgctttttttgt

SEQ ID NO: 1552 - DNA, 397 bp, Homo sapiens
accgtcagcatccacagccatacatcttccctgactctcctgggggcacctcctatgagagatacgattgctacaaggtcccagaatggtgcttagatgactggcatccttctgagaaggcaatgtatcctgattactttgccaagagagaacagtggaagaaactgcggagggaaagctgggaacgagaggttaagcagctgcaggaggaaacgccatctggtggtcctttaactgaagctttgccccctgcccgaaaggaaggtgatttgcccccactgtggtggtatattgtgaccagaccccgggagcggcccatgtagaaagagagagacctcatctttcatgcttgcaagtgaaatatgttacagaacatgcacttgccctaataaaaaat

SEQ ID NO: 1553 - DNA, 263 bp, Homo sapiens
actaattaaggtattgaatttactgggttttagaaggctttaaaaaaaatccagataaatcaacaacaaaaatacagctcaactttgaactgcattaaaatccagaatctctcattttagatgaccattccttattcccctcaaaaggtttccaacagaagctatttcacaaactgattattagaatgtcttctccccactctccccaaaagcaagtatgcatggaagtgcatgcttttaaccttaagaaatgtatttttggt

SEQ ID NO: 1554 - DNA, 513 bp, Homo sapiens
acattatctttaaggggttttctttttttcttcaatagatatcccaaatatacacacaatcctatttatttgggtctaggatgtaaatataatttaactgtgtgctaagtgctttaggtaacacaagcatttatctattgtaaaatgaaaattcaattgccatcaaataagaattttgatttcagtcagaaatgcaataaattatgccataaggaatatatttgtatacattttgtctcagatattttctcatgtggtattgtgaagggtaacaagtataatattatctgtaaagaatttaaaaaaatatttttaaatataactaatagtatatactgattttgacagttttctttccagaactcaaaacgaaagctatttttaaaaattaggtgattttgataactattaaactttaatcaatgcattaagaaacaggcagctggcgatctaatgcataagttgctctttccttactgtatttttcagaccacttgcgagtcagttctaggt

SEQ ID NO: 1555 - DNA, 211 bp, Homo sapiens
actattttaaggagctatctgtttatgtagaatgattttgttaagagtaatgtaaactattattgagtagaggcctaaagaggactgtgcatttttgctatttaaaggaatcacaaatgatcatacttaagtgagcaaaaatgacaagttttactagctaagtagagaaataaatctcaaatgcagcgctacaattttcattatcttaagc

SEQ ID NO: 1556 - DNA, 303 bp, Homo sapiens
gcaaacttgcactttcatttgctaatataaattcagttttattttaccattttagagactactaatgattaaatgtagaaggagagggtgcacatgtttttatgtggagtgtttaaaagataaatttataccactgtaatgtgcagcttttattaaaagagaaattggttgaactgctaggttgaatgagagacttcatctattggactattttttttaatccaggcatatggtctttagtaatggcttgtaatttgtgaaaacattaatttgggggttttccctgttttcagttgtccatgt

SEQ ID NO: 1557 - DNA, 133 bp, Homo sapiens
acccatgtagactagcaaaatagtatgtagatgtgatctcagttgtaaatagaaaaatctaattcaataaactctgtatcagcccccaaaaaaaaaaaaaaaaaaaaaaaaaaaaaaaaaaaaaaaaaaaaaa

SEQ ID NO: 1558 - DNA, 505 bp, Homo sapiens
acaattccagcagggaaggagctcaacactgaattctaaagctatgcacttgactgttttctttctccttgaccttttcatagcaggggtgaacaactggatgctgaggaggaaaaaactgggcaaattaaaggggaatgagcttcagaccccatgcagagctggctgtgagtccgggtttcactgctcaccagctgcatgaccttgagcatgtgacttccccactctgagttgcggtggcttcagtgcaacacctgggtggcggttaaaaacctcgtgatccacaaatgaaggcccttgttattagttggcaaaaaattaaggaaaaacaaagaacaccatggccttgaagagtgttgggcaggagactgctcctcctccggaggaaagtgaagacaggaggctgtcacatcgtctctgacatggagagtggcttccgggccatccgtaggggaaggacacagagctcttgagcccccttctagattcaaggttggcgttttac

SEQ ID NO: 1559 - DNA, 574 bp, Homo sapiens
  misc_feature 505, 519, 520, 527: n = A,T,C or G
acaggcgaagtgttctattgcatcacaagtgctagtgatgcagtaacagatccaagggcataatattaaatatgtttttttccaactgcgatttagttgaaaaataacataatacaaacatatattaatggctatcaagaccagcagtgatctgcagaatacctagaggcctacctaattagaaggttgaaacttagtaaaaccgtattaaagtcagtgtttttattcttagattaacaatgacagagtgagatatctttgattacaattttataaggtgtggtggggaattgagaggagacagatattggggaagactggcagtgtgtgctgagttagagtttgggaatgtggctcaaattagtcaatattgattaggatattgttttagaaaattttaaatgtgtcctaaattgtggcatattgaaaacgatattaaggaacaatgactcattagccctaaatacaatttaatgagtgccatcaatgggcttaagaaataagnagggatgggggatnnccgaggnaaaatgaggtgaaagagaaaatggaaagtggaaaatatgtttgaaca

SEQ ID NO: 1560 - DNA, 413 bp, Homo sapiens
acctatttgacttaccatggagttaacatcatgaatttattgcacattgttcaaaaggaaccaggaggtttttttgtcaacattgtgatgtatattcctttgaagatagtaactgtagatggaaaaacttgtgctataaagctagatgctttcctaaatcagatgttttggtcaagtagtttgactcagtataggtagggagatatttaagtataaaatacaacaaaggaagtctaaatattcagaatctttgttaaggtcctgaaagtaactcataatctataaacaatgaaatattgctgttatagctccttttgaccttcatttcatgtatagttttccctattgaatcagtttccaattatttgactttaatttatgtaacttgaacctatgaagcaatggatatttgt

SEQ ID NO: 1561 - DNA, 549 bp, Homo sapiens
  misc_feature 536, 541: n = A,T,C or G
acatggcaattagaagttgtcatggcaaaagaaaaccacagctggcctgccacagccaacacaagaaccagaaaatggtagatgaaatgaaggaataaaggtggggtttattccttattataaaagaaaaaaaataattcttcagcagtcttaacaaagacatcaagatacaaaattacaagtgttttgactccagccctgtccccatctcctccaagagcagaggtaggagacagttgaagcaaacaagcaattctgtaaaaattacctagaaaccctacaaatttgattaaaatctaaacttctataattttgctttttaaaaaatttaatatcaaaaggcctgctttagtgacatgctattcctaccagaaaataaccccaataccccctctgtcagtaacatgctcaagttgaccagccaactcttatctctaaacctatgtggacaagtgtgtcttttaaaccaaagccacggagatcaagtgactgctagtaacgtgtcgtctgttaactaatccagtgcccaccttctncaganggtgggca

SEQ ID NO: 1562 - DNA, 522 bp, Homo sapiens
actgctcggaggttgggttctgctccgaggtcgccccaaccgaaatttttaatgcaggtttggtagtttaggacctgtgggtttgttaggtacagtggcaagatcacacaatcttagcgcactgaagcctcaaattcctgcactcaagcctcagcttcccaagtagctaggactacaagcacatgccaccacacccagctaatttattttttgtagagatggaggtcttgctacacttcccaggctagtctcaaactcctgtcctcaggtgatcctcctgcctcggtctcccaaagcactgggattacaggtgtgagccacagtgcctggccctcttaccagattgtttttgttttgttctatttttctgtttgttttttttaatgacagtttatatggtcaaaggaaacatggacctttctatatatttgtctttcaacttctctatattgctcaatattacatattaaattatattcctttaaatatttctcatcctttaataatgaggatgctaattaa

SEQ ID NO: 1563 - DNA, 346 bp, Homo sapiens
acgctgaaacacacacatgtaacagctattaggacactgtaaccgtcctctgtgtattttaaggccaatagtaacagagaggagggaaaaaaataactaccaagaaaataaaactaatgggtagattcacactaagaaaatctaggtaattatataaattcattgttatgaggttgtagaaaggacagttatctcacgacatatggaaaattggtgaatttcctgtgagactatgatttatgcttttgtgaatgtatacctgatctaaaaataaatgttttgtctaattttagacaaaacatttatttttagacaccaactaattggaaaatataaggaaagaaat

SEQ ID NO: 1564 - DNA, 215 bp, Homo sapiens
actacaagcccaccaagctaaagaggctgcccagaaagcagttaacagtgccaccggtgttccaactgtttaaaattgatcagggaccatgaaaagaaacttgtgcttcaccgaagaaaaatatctaaacatcgaaaaacttaaatattatggaaaaaaaacattgcaaaatataaaataaataaaaaaaggaaaggaaactttgaaccttatgg

SEQ ID NO: 1565 - DNA, 562 bp, Homo sapiens
  misc_feature 522: n = A,T,C or G
acagattgggcggaatgtggagaaggttggccacagtccagagccaggagcccatggaacaacttggaaggtgactcaggtgaggctgtcaatgagggaatcccgcatgctggtggcaatggtgctaggctgggcttcattcagcttgaagacactctccaccactgacagctctgtgctggttgtgtccaggccacagaaggcacaccagtcattcaccaccatcccagcagcaatcacctcactgcctcggttcacagtccccgccacaagggggacttgaagaagagaggacagctcatcctggtcttcaattgaagtcttgggatacaccagccctccctgattgctgaagacacagtagcttcctactagcacctggtcgaccactgtctgtctgaagacttccaccttgagcacatctgccagaatttcttctgtctccctgtccaagtctgggtggaccaaggccacgtagtcattgcaggtggtgacattgcccaaggctgagagccgctcctncacccgcctaatctgcactgtgtctgggaggctgttgcga

SEQ ID NO: 1566 - DNA, 147 bp, Homo sapiens
acctaagtggtgtgatgtaaatactggaaacaaaaacagcagttgcattgattttgaaaacaaacccccttgttatctgaacatgttttcttcaggaacaaccagaggtatcacaaacactgttactcatctactggctcagactgt

SEQ ID NO: 1567 - DNA, 339 bp, Homo sapiens
actcactgttcttcataaacaccagctaaaaactggtataaaaaaaaagaaaaaaacccccaaatcatgggattcatacaaagatgactgagtgggggcaaggaagactcaacctaaccagcattttaccaaatctgtcatgtttgaatcgtgagagctccatggaagaaaggagatgctaagtagcgcttcaaagcttcagaccacaaccaaaacacagcaccatttcaaatagaagcagtagccaaacactgctcactttgatatggttcaaggatgctgacatcaatatttatctgctcattcatccaggaagaaggggacatcagttactactgt

SEQ ID NO: 1568 - DNA, 337 bp, Homo sapiens
acaccacctccaaaaataaaaaatggaaaacacacctttagtgaagtagaagtatttgagtatcttgatgcagtaacttatagttgtgatcctgcacctggaccagatccattttcacttattggagagagcacgatttattgtggtgacaattcagtgtggagtcgtgctgctccagagtgtaaagtggtcaaatgtcgatttccagtagtcgaaaatggaaaacagatatcaggatttgaaaaaaaaattttactacaaagcaacagttatgtttgaatgcgataagggtttttacctcgatggcagcgacacaattgtctgtgacagtaacagt

SEQ ID NO: 1569 - DNA, 574 bp, Homo sapiens
  misc_feature 502: n = A,T,C or G
acaacactgactgctcagacacatttaggttcagggtggacctttatgtcttgtcaagatgcctaggcccggctgggcgtggtggctcacacctgtaatcccagcactttgggaggccgaggcgggcggatcacgaggtcaggagttcgagaccagcctgaccaacacggtgaaaccccgtctctactaaaaatacaaaaattatccgggcatggtggcacatgcctgtaatctcagctactcaggaggctgaggcaagagaatcgcttgaacctgggaggtagaagttgcagtgagccaaaatcacgccactgcactccagcctgggcaacagagtgagactccgtctcaaaaaaaaaaaaaaccggatgtctaggccaatgataattatttttgatgcagtgtggattagttcttttgttaaccccactgtcttggggaatgatgccagctgggaaattgagtttttgactgaaacatggagccttcactgctttttttntggttcctatgaagatttggaacatagaaaacacaaaaacttaccttaaaatttgagcaggtcgttgatggc

SEQ ID NO: 1570 - DNA, 599 bp, Homo sapiens
acaccaccataccttttcccagaatacccagaagcaagcaagaatacaggtcagaatagggaggtttcaattctgtatccaggggccaaagaccaacgccaggggtccctgcttcctgaagaattagaagatcagatgccaagattggtggcagaagaatctaacagaggtagcacaaccataaacaaagaagaagtcaacaagggaccttttgtagctgttgtgggtgttgccaaaggtgttagagattcaggagctcccattcagctgatcccttttaacagagaggagcttgctgagagacgaaaagcagttgaatcctggaacccagtgccttattctgtggcctctgctgcaatccctgctgcagccattggggagaaagcaagaggctatgaggagagcgaaggtcataatacaccaaagttgaagaaccagagagagctggaagaattgaagagaaccacagaaaaattggaacgtgttttggctgaaaggaatttgttccagcaaaaggtggaggagctggaacaggagaggaatcactggcagtctgaattcaagaaagtccaacatgaattggtgatctacagtacctg

SEQ ID NO: 1571 - DNA, 122 bp, Homo sapiens
  misc_feature 28, 96: n = A,T,C or G
actatagggtaaatacgggccctatttnaaagatttttaggggaattaattctaggacgatgggcatgaaactgtggtttgctccacagatttcanagcattgaccgtagtatacccccggt

SEQ ID NO: 1572 - DNA, 262 bp, Homo sapiens
acttaagtcctagatgtccaagaaagacagtatcttgtctcagagtttacaatcctggggaagagacaggtgatgaaacagcctgacagacccaaatgtatttcagagacaatcacaaggtgtaaggtgcagataaaagaggcatctaagacctgtggaatttggcttcaccaaataactgggtatttagttaaaacataaatgcccttgtggctatggtataactttttgtaatatgtccagcacaccaatcacatactgt

SEQ ID NO: 1573 - DNA, 619 bp, Homo sapiens
  misc_feature 497, 501: n = A,T,C or G
acaaattcaagtgcggaattattacgccattttaagtattatctacttttttaaaaaatcacagtggtcttcatcacatggcgaaaaaacaaacttcactcttctccaaagggataagtccatcctaaatgtaactacaaacaattgtataaacctttatagtttttccccctaatctactaaacatattccagtgtcatttagtagttttacatagaatctgcactatacttggatactcagggaaaataagatgacatatattgtagttttagaacgcaaaagagctttcattttagacaaatatacaacatagaagccactaaaaaatatgggtctattaatcaagagcccatttcaaaatgataagagcatttagtatgtagatctggaatgcacagtttctggaagtattagaacttagtgttaaacagtgcccttataccctcttctaatactgtagacacctaccaaccagatttgatttcccctaattntatnatttccatcagaaaaccaaaaacagattattggggatccacctgtaactgaccagagcaaaaagtttttaagacttccgtttgtgtgttgcaacttttacattcaaaaccagatctct

SEQ ID NO: 1574 - DNA, 214 bp, Homo sapiens
actacaagcccaccaagctaaagaggctgcccagaaagcagttaacagtgccaccggtgttccaactgtttaaaattgatcagggaccatgaaaagaaacttgtgcttcaccgaagaaaaatatctaaacatcgaaaaacttaaatattatggaaaaaaacattgcaaaatataaaataaataaaaaaaggaaaggaaactttgaaccttatgt

SEQ ID NO: 1575 - DNA, 98 bp, Homo sapiens
  misc_feature 64, 84: n = A,T,C or G
acaagcttttttttttttttttttttttttttttttcttttttttttttttttttttttttttngcccaaaaacttccattgtnttaatcaggagtta

SEQ ID NO: 1576 - DNA, 419 bp, Homo sapiens
acctctacagagaccaaaactcattctcttaaagagattttatggggctactgcagataaaaataggacacaatattaaaggagctacagaaggaagggagtcccatctcaaaaaaaaatgaatgtatgccactgcaattagagtatccaataaaggagacagtttagagtcaggacagaaaagcttccataattgaactagattacataatagtatttctagaaaaagagatatttttagattgtatgccacttttgtttaagaactgtgctgtgatcactgtattaattttggtttatcttggcatatatccttcagtttgtttttatttttaatttttcctttttttccgattaggctttggtcagcatttttcatttaaagaaaagtaacactcccatccactcataagcttggt

SEQ ID NO: 1577 - DNA, 546 bp, Homo sapiens
  misc_feature 31, 345: n = A,T,C or G
accaactctaagccacactggactaattcanatggaggcatactttccaaactaatcagatgcctaataaagtgttggagtatacgtgtggacatgtagaagggatagttgcgaatgtctgaccttgtggaaatttccaaagatgtctacccataaacggtaattggcagtgttcatgactgaattaaatttagtcttttgaatcttgtcagacaaggatcccagagtgattctggcacatcactcttcttatggataatctacccacccagaagataaaaccctcagtaaatctgagatagtttttaaaattacaagaatatttagcaaacttcaagtgagtanagtatataaaaatgtaagctggaaaaagcagcctttgaaatgagacactagaatatctttggtagataaaaactctattatttcaaggagagagtttttgtttctggaaagtgctaagttgtgtaacataaaaggcattactaaattcaggtgacaggtaaaagaatattttttttaagaaataataaaccatgcatattg

SEQ ID NO: 1578 - DNA, 88 bp, Homo sapiens
tttttttataagattattagtataaaaggggagataggtaggggtagcgtggtaagggtgatgagtgtggggaggaatggggtgggtt

SEQ ID NO: 1579 - DNA, 334 bp, Homo sapiens
acacaaggtcccaaaaagcgagacctgccatgacaccattgctgtgattcacatgggaggtaataggattggatcggggtgacagtgatggaggtgatgagatgttgttgcatttgggtttatttttaaggtagaacaagatttgctgaagaatgagattttggtgtgaaagacagggattaaggatgactccaagtttctgggcctgagcagttgaaagtaaggaatggccattaactgagatgagaagactataggaagaatggggtttggttcatggaggaaggtcatgtttggtttggaatatattgaatttgagatacccattatctgt

SEQ ID NO: 1580 - DNA, 541 bp, Homo sapiens
  misc_feature 511, 524, 531: n = A,T,C or G
acatctgagtccaaagtgtatctgaatgtgtgctctgaccttattcttaaatgttttctccccatactttatagccatttattttttaaacaccttaagaaggaacgaaaaagttctcttggatgacgtatattcaagtctgagccaaattgaggattgtgtctaggaaatctgtaaagccatactactgtgttcattagcatgagcaatttaaaatgaaaatgaattaaaaagttaaacatgagtttggttttaattttggggggatcttaagatatatttctgggagtaggatagccactgaaaataattttgaatagatgataaagtacctgcccgggcggccgcccgggcaggtactgaccagcaaaatggagaagatcagagaatgcagcagcagttttttttcttgttttcttaccactttattctttcagagtttaaagaaaatggactcatgcacagaacactatgcattttgaaacttgttcatcctggatttttttaaatnatttttatctcanaacttanacaaaaatta

SEQ ID NO: 1581 - DNA, 352 bp, Homo sapiens
cgttgcgttccaaggcatctgtgagcccgcggagtatacaccatgagcaaagctcaccctcccgagttgaaaaaatttatggacaagaagttatcattgaaattaaatggtggcagacatgtccaaggaatattgcggggatttgatccctttatgaaccttgtgatagatgaatgtgtggagatggcgactagtggacaacagaacaatattggaatggtggtaatacgaggaaatagtatcatcatgttagaagccttggaacgagtataaataatggctgttcagcagagaaacccatgtcctctctccatagggcctgttttactatgatgtaaaaattaggtcatgt

SEQ ID NO: 1582 - DNA, 350 bp, Homo sapiens
ggttttaagaagaatgccattgaacacccagttcgaaccaatcagattccacgtcagattcctgaacagtcgttctacacgaagcccttgcctggtattatcatgggagggattttgccctttggctgcatctttatacaacttttcttcattctgaatagtatttggtcacaccagatgtattacatgtttggcttcctatttctggtgtttatcattttggttattacctgttctgaagcaactatacttctttgctatttccacctatgtgcagaggattatcattggcaatggcgttcattccttacgagtggctttactgcagtttatttcttaatctatgcagt

SEQ ID NO: 1583 - DNA, 366 bp, Homo sapiens
acagcttctcaaatcatgttagaagggtctcacattcaatgatcaagaaattttaaaatagcagtaattattttcattttaagaaaaggttccctttctcccctcccaccccaagtatttaacatgaaagaatgggcttccttacatattaattttatacttatttttgaagcagcaacaattaaccatcaatttggcatttctgtttacagtcgctacaaaaatttttttaatttcacaaagccattatccagtgttgccatgaaacagagactgtaaattctaggtagctaagattctttctgaaaccaatgttaagtcaaagaaatataaagcagggcattacactaagtttctggatctagt

SEQ ID NO: 1584 - DNA, 561 bp, Homo sapiens
  misc_feature 388, 406, 411, 503, 515, 517, 518, 547: n = A,T,C or G
acaaaatagctgcaaaccaagcatcagtcatttcacaccagcatctctccaaacaaaagcaattgtgaaaatgtgtttacttcagaacggcactacataaatgtgaaaagttgttgatcttgaaatatctcaggatagcacttttggcaaactcttagccaaggcttcttcattggtgctgttataagatggtgtcctattttcttgtttatacgttcattctgtttgttattgctactatgtaaaactttcacatgcaaccaatgtatatctgagtttgaagatgtttatatagggtattttttccaactgcccctgcattgtgcctgaaccaattgaatcttatgtatgagtttcatttgttttattaatgttaatttaaatctgnaaataattgctttattgngatgngatacagaacaaagtgttcgtttttgactgaaaatagtagatcagaaatctcagtttaatataaaatgagctaagttttttaaaaataaatnataaacttgganannagaaaaataaagcagttgctgtagaatangctgtatctttttc

SEQ ID NO: 1585 - DNA, 545 bp, Homo sapiens
gtagaagcaggaggttttcaacctagtcacagagcagcacctaccccctcctcctttccacacctgcaaactcttttacttgggctgaatatttagtgtaattacatctcagctttgagggcccctgtggcaaattcccggattaaaaggttccctggttgtgaaaatacatgagataaatcatgaaggccactatcatcctccttctgcttgcacaagtttcctgggctggaccgtttcaacagagaggcttatttgactttatgctagaagatgaggcttctgggataggcccagaagttcctgatgaccgcgacttcgagccctccctaggcccagtgtgccccttccgctgtcaatgccatcttcgagtggtccagtgttctgatttgggtctggacaaagtgccaaaggatcttccccctgacacaactctgctagacctgcaaaacaacaaaataaccgaaatcaaagatggagactttaagaacctgaagaaccttcacgcattgattcttgtcaacaataaaattagcaaagttagt

SEQ ID NO: 1586 - DNA, 541 bp, Homo sapiens
  misc_feature 261: n = A,T,C or G
acacaatggtttattaaaggaatgtatggcccacatcaacctagcaaggattctactggtaaaccttcctatggccaaaggaaaaacaagcaggagttgagtggctggggtggggtgcaggcaatggagagagggcagaagggtgtagaagctgaaggggtctagaagcttactcctgagtttcttccttctgtcttcaaatctttacttcttatggccaaagacccagcggtttcataggctggagatgcactcttctanactgctcgagacagccagagacaggggaggagggaagaaggatactgtggaaagggatggcggggcaaacatttagagctagaagccactactgggccaatgctaaagtttctgtctctaagcctaaaaaagccagtgtagtagggcccttatcactcttagtttgctaggtttcccctctgaaataatgagcagatttagccaggctagcagaaaggaagaggacggggctgtgcaggagttagcagaatcttgattcttgctctatggtcggtacctc

SEQ ID NO: 1587 - DNA, 374 bp, Homo sapiens
accttagagttcctggccagagttgactctaggtagtgatgtgattttcttgggatgtttttctaaatattcttttatgctaaagcacatggcttgatacttctgttgattaagctcgtgtctacttacagtcatctagtgagaacctgtggtgtggtgagatgataacttggtctttggtcttcatcatttgaactagttttggttttgtcttgtcccttccttgagcattttgtgtgtgtttaatcctatttggtaaatgaaccactgtgaaagaccaagttggagaaaacagaacacccccaaaacatttattttttttttagaaaatcatggctcactatggtagtatacaatattgttttcacacatgt

SEQ ID NO: 1588 - DNA, 556 bp, Homo sapiens
  misc_feature 443, 446, 470, 497, 499, 508, 527, 535: n = A,T,C or G
gaagcagagaatttggggcttctgagatggctggagtttgtggggcagaataagggggagaagaaaaaaagagctccagaaatctgcaaaaggttccccttaagtctttgatcaaatactaagcttgtagataacagcttacaaggcctagtagaaaagagctgcaaaggagaggtgaactggagattttatagattactaggagataaaagttctggacaagcgagtggaaaccttactgaactccttggacactccattgacatctcagaaagaccacagtttaggggtagggccaaagccatagagtaaaagctactctagacccaaactaataagcttaaaaacaagcctcaaaaggatcaaggtgatttgccagtattttgactgcttgtggaaacaaaactcaatatattctctaaagataataaaatctctatgtncanttatgtagcaactataatgttcancatgcaatgagaacttttctagatacncnaagaattangaaaatataggttaaaaanagggtggnaaaaaaccacaacagtcaaca

SEQ ID NO: 1589 - DNA, 510 bp, Homo sapiens
actttcaacacaccgtggacaggggaggaaatgggttctgcttgctgaccaccagcttctgatgctgatgcgatatgtagcctttgacgtgtcccatgtatatcaagttagccagaatacactgaacttcgtcaatgtccacgtcctccacctgcatgaacttcaaggcaaccagaaaagcatccagagacagctggtgtgttttcagtaacaaatacactttcttaaagaggttcctgtaggtgatgatcttcagcttctccaggatgaggaagattccgcagcgaatgaagaaggcctcgtgcttcgccagcgcctcgtgcagcagcagcaggttgccctcgctcacagctctggttacttccgcaaactgcatcaggtgatgctttttcaggagctccacagtgggcatgtgacccaatagcatttttactggaagcaaatagatcagaatcatccttttgttcttctgactagaacggtgacaatgctcaaaggcaaatgacaggt

SEQ ID NO: 1590 - DNA, 180 bp, Homo sapiens
actcacaggcttcttctgccagggacatccgttaaatattgttcccccaccactgagtcctggagctatagatggtcatgacagtgtggttgacaatgtctccagccctgaaacctttgttatttttagtggcatgcaggctatacctcagtatttgtggacatgcacccaggaatatgt

SEQ ID NO: 1591 - DNA, 261 bp, Homo sapiens
accctgaacggctgtgctctccacccttgtatcggtgagtggatcttgtctacatcagccgtaagcctagaagcagagcgggatcgaggcgtttttaataattcgagttgggaagacccggatggttcatcaaaatgatggtgttgagcacccgggaggcagacattgggtatttgttcacaattttgcacctgtaagaaaatgttcctttataactttcaaggattgccgtgagcgtctttggggccttttcattcatgt

SEQ ID NO: 1592 - DNA, 591 bp, Homo sapiens
actcctgccaaggcagctcccaccgctatgggcacaaggaagttgtcgtcatctgcactgcagtcttgagctgtagaatactttccttgtgtcacattgaaaggctgaacccttagatcaaaggtatttatctgaaatgctccagacactgaaacagtctgctctttgttgcacatataagaacttcccaggggggcatcccagtagctgagattgttatttgcaatgctgaaaacggagccattaaccaaatacatgctgatgttcacttccttcagataaaatcggttttcatttttcacagcaaagacaaagtctagatacttaatggtgctgctattgagtctaagtagagcagtgtgagaacggcagctgcctgtggagtgagttgtattggggttgatgttaataactgaagcaaccttatcctgagtgatgttcagctgcagccccatggtagccagcagacaagtatcattgccattattaactgaataggttccagcttctggtttttcctttggagtaggtgttgtagtaggagatggcacagtggtgtgtatggtgggtgccactgttgaagttttgtct

SEQ ID NO: 1593 - DNA, 358 bp, Homo sapiens
  misc_feature 288, 299: n = A,T,C or G
accctctttcccttcccaccccccaattaaaggcaaacaatggcactttgctcttgcttaacctagattgtcttcaaaaactattaaaatgtaaaagacttaacaaaaaaacaaaaagacgtttaacagatgtcaaaaagctccttagtgtttgaaaataaatgcttaaacaaaagacaacatattttatatcaaacaagtttgaagagccctgaattgcagcattctgtaacataaacaaacaaaaagctggtataggatttattgtcaaaggcagaatttcttcangcaggtaagtnaggaggtggtggttctttttcaggcattttcacggccatttcataggttggcaaaacgt

SEQ ID NO: 1594 - DNA, 257 bp, Homo sapiens; identical to SEQ ID NO: 1267

SEQ ID NO: 1595 - DNA, 257 bp, Homo sapiens
actccctgctgttccgcaggacctccaccttcgccctcaccatcatcgtgggcgtcatgttcttcgagcgcgccttcgatcaaggcgcggacgctatctacgaccacatcaacgaggggaagctgtggaaacacatcaagcacaagtatgagaacaagtagttccttggaggcccccatccaggccagaaggaccaggtccacccagcagctgtttgcccagagctggagcctcagcttgaagatgatgctcaaggt

SEQ ID NO: 1596 - DNA, 526 bp, Homo sapiens
acttaaaataatttcgtatattaatgcgcttttatttttattttttcttttaggaagctatcatacaaataatgaaaatgagaaagaaaattagtaatgctcagctgcagactgaattagtagaaattttgaaaaacatgttcttgccacaaaagaaaatgataaaagagcaaatagagtggctaatagagcacaaatacatcagaagagatgaatctgatatcaacactttcatatatatggcataattttgaatatcatggacaatatttagaacccaaattttggagtgcttgggcagaaagttgtaaagtttgtgctggagaaaggtttatttggactttgattacataaatattaaaatctctgccttaccttacaaaaacaactatattttgccaatcacattagttagcatgatggcattcccttcatgttgcacactctttgacagcatgctgttttgtggagaaacttgcattcatgaagagcccattatcaacttttaaaagtgaatttgatttgt

SEQ ID NO: 1597 - DNA, 255 bp, Homo sapiens
actatatctattgcgccaggtttcaatttctatcgcctatactttatttgggtaaatggtttggctaaggttgtctggtagtaaggtggagtgggtttgggggaaaggaaaaggcttaccaggctgctatggtcaactcttcagaaattttcagagcaatctaaaagcgccaaaattcgctatgtttacagtgatactattaagaaaatgaatgtgattctgctctgtctttttaggtatgatcaaataaaaaat

SEQ ID NO: 1598 - DNA, 250 bp, Homo sapiens
acccatattgttaatgctaggatcaagataccacatagccagaacaagaagttgaaggtaaacatagaatattttatacaggcactcacacctgccatttcggaaaaggattaggaatccagatgccgtgaatttaactattcgttacaggcttgtcctgcaatatgctctggagcaacttgcctgcagagatttctgtatccacggacatttaaatatcgcaaaggctatctccaggcaagtatgttcc

SEQ ID NO: 1599 - DNA, 443 bp, Homo sapiens
  misc_feature 373, 414: n = A,T,C or G
acacactatatttacatcacccaccctgaaaacagcaggttctggcttttccgtgaacccccagatgaatataaattggagcctctgagaacagttccttccccagagcggggagtgtgcacgtgtgtgtgtaaccttctgattccatgggacctggccagcccctctggagccacacagcacctccttgccttacaccctggctccagcttcactggtccgggggacgcctcagcctggggcagctgtgatgtaaaccagttactccacctccatcttcctcttctgcaaagaatcgaggaagtcttgccactctgctgggtaaaagcgttttatagacgttgatcttactccgaatctgttttggggtatnttgatagtaattcttctcatcacgggccatggccttatagncctccccgtggttctctaccatgtagcgt

SEQ ID NO: 1600 - DNA, 201 bp, Homo sapiens
  misc_feature 12, 20, 72, 73: n = A,T,C or G
tttcctccaggntgtaatangcgtagaccttgactgctccaggctggataagctctacattaaagtattggnnaactttgaaagctagacagtcatcctcagagtgtgagaccttgtccaggtagatgatgagggtgttcctatcggagaaggctttgtccagctcatacttggagatgtatctgtcaacaccattggcca

SEQ ID NO: 1601 - DNA, 542 bp, Homo sapiens
  misc_feature 150, 303: n = A,T,C or G
accaaacgggcaaggacatctctacaaattactatgcgagtcagaagaaaacatttgaaattaatcccagacacccgctgatcagagacatgcttcgacgaattaaggaagatgaagatgataaaacagttttggatcttgctgtggttntgtttgaaacagcaacgcttcggtcagggtatcttttaccagacactaaagcatatggagatagaatagaaagaatgcttcgcctcagtttgaacattgaccctgatgcaaaggtggaagaagagcccgaagaagaacctgaagagacagcanaagacacaacagaagacacagagcaagacgaagatgaagaaatggatgtgggaacagatgaagaagaagaaacagcaaaggaatctacagctgaaaaagatgaattgtaaattatactctcaccatttggatcctgtgtggagagggaatgtgaaatttacatcatttctttttgggagagacttgttttggatgccccctaatccccttctcccctgcactgtaaaatgtgggattat

SEQ ID NO: 1602 - DNA, 94 bp, Homo sapiens
  misc_feature 2, 82: n = A,T,C or G
angcgtccttcaggtaatgaacttcagctgcagtgtgaaaggggcaggaagactggcagctgtcaaaactggaacagtccantgagtatgtgca

SEQ ID NO: 1603 - DNA, 378 bp, Homo sapiens
aaggagcctacaggccacttgaggaaattctctggttttgctgcagcttcgcttcaaacttccacagcagaagagttggaattctaatgccgcaatatcgttgtaataccagggattctctagaggcaagttaaggctttctgggcaaagaaaacaattccagatgatattgtgatagaatgctacagtgaaatgcttcttaatgactctcctgtcctgcctaaaggacaaagacctatgagtgacttcaacttgacgtgatgtttcagtgatctttacttcagctctaagtcagaatcaatgccacaggaaaagaaaagcttcttacatctcagacatctgcttgctgagcaaacacaaacaagaacacctgcccgg

SEQ ID NO: 1604 - DNA, 285 bp, Homo sapiens
acttctcatgagttatcactcagttttgcttctagagacccaccagtcaaagcagtaaaactaaatctccttaacaaaactgaagtcttcagaaaagcagtgctaaatgggtgatgaaaccttacttaaccactccctgtatgcaagatgacttattttgcattcctaaaacttctactttgattctcaatatatccgttttttttttctttttttcaaaagcattattttggtgaaaatcccaatatatgagtttaaaaaaaaatcattaacatcattaacagt

SEQ ID NO: 1605 - DNA, 546 bp, Homo sapiens
  misc_feature 19, 175: n = A,T,C or G
agcgtggtcgcggcgcgangtaccaattatatcatctcagtcttgaatttactcacgctgattgttgaacagataaatacgaaactgccatcatcatttgtagaaaaactgtttataccatcatctaaactactattcttgcgttatcataaagaaaaagaggttgttgctgtancccatgctgtttatcaagcaatgctcagcttgaagaatattcctgttttggagactgcctataagttaatattgggagaaatgacttgtgccctaaacaacctcctgcacagtctgcaacttcctgaggcctgttctgaaataaaacatgaggcttttaagaatcatgtgttcaatgtagacaatgcaaaatttgtagttaaatttgacctcagtgccctgactacaattggaaatgccaaaaactcgagtctttaattgtaatgactttgttttatccacagttaagccttttctcattacatatttatgtatttcactgtcatgtcaacatgtctgcagaatcactgtatgtaacaaacagccatattt

SEQ ID NO: 1606 - DNA, 582 bp, Homo sapiens
actggagatgtatttgataaccaaggttttaggtaaattttcaccagtattagttctatttgcaaactgaaaaatgttgtaggcttaatataaaataaccacattagtgaacattatatctcttagaagaaaggccatattttgctcctgcttctgtaaaaatattatttgtttgaaggggaaataatggtagtgtgacctttcacttaattcctactcccttaatgtgagagagacaaaatgagctgaagaaggaaaattctggagttacactccacaaccttgaacatactgacggacatctctgttttgacaacgatttctccatgccacccatgctctaatgccttgtggatcacggacaaccctctttgcacaagctacagcatcagcgatgttatcttgcagcaaagcactgcaggataaatgacaggcattaactgctcctggggttttgccatcattacaccagtagcggctattgatctgaaatatcccataatcagtgcttctgtctccagcattgtagtttgtagctcgtgtgttgtaaccactctcccatttggccaaacacatccagtt

SEQ ID NO: 1607 - DNA, 257 bp, Homo sapiens; identical to SEQ ID NO: 1267

SEQ ID NO: 1608 - DNA, 103 bp, Homo sapiens
acctgctttggcaatcattgcaactctgagattataaaatgccttagagaatatactaactaataagatctttttttcagaaacagaaaatagttccttgagt

SEQ ID NO: 1609 - DNA, 59 bp, Homo sapiens
  misc_feature 26: n = A,T,C or G
ggtgaagtaagcctgtgaaggaccancatgggaatcctatactctgagcccatctgcca

SEQ ID NO: 1610 - DNA, 445 bp, Homo sapiens
  misc_feature 21, 50, 58, 73, 86, 111, 292, 377: n = A,T,C or G
acagcgggttgaaacaatttntctaggtgagcacccctgtgacagagganaacaagtnactctcttcctcttnaatgattgcctanagatagcaagaaaacggcacaaggntattggcacttttaggagtcctcatggccaaacccgacccccagcttctcttaagcatattcacctaatgcctctttctcagattaagaaggtattggacataagagagacagaagattgccataatgcttttgccttgcttgtgaggccaccaacagagcaggcaaatgtgctactcagnttccagatgacatcagatgaacttccaaaagaaaactggctaaagatgctgtgtcgacatgtagctaacaccatttgtaaagcanatgctgagaatcttatttatactgctgatccagaatcctttgaagtaaatacaaaagatatggacagt

SEQ ID NO: 1611 - DNA, 313 bp, Homo sapiens
acttttctatgatgacccgggccgccttcttcacggttttggtgcgaacgcggcacgactgagcaccaggcctgagcgaccacctccctgttcaggcccagcctctggagttcattcctatcaatgtcattttgattgtgcagtaagatgaaaatttgtcattacaatagttacagtgacagagaaatgcacactatgaatcaaatagcaaggaaatgaagcaaattataacacagtgtggcaacgcacgagcaagtaaccattagagtaacattactttgtccagtaaatgcttcagttccaccacttgtac

SEQ ID NO: 1612 - DNA, 106 bp, Homo sapiens
  misc_feature 65: n = A,T,C or G
tacaccttggagtccaccgccaatataaataatacacatcacgattccatgatggtgcaacaatngcaatttaagtgaattcaacatttaaaccttttctgggcca

SEQ ID NO: 1613 - DNA, 503 bp, Homo sapiens
acacaacaacatttttggaaggacatataaagtgaatacaaccaaatatattaaaatggtttcaattaccagcattgaaacagtgcaaaaaaaagccaaatacaattgcacagatagtggactcccttagatcttgaaagtgaacttgattcctgacctctcccattgtcactccaagtgaaaaatgaaagcatggggcttttcttgcttcttggttagtatgagacattgtgttcatctgagagcaaaatcaacactagcatcacagcagaagtgcccatttcagcaaatccggtaaaaattgtaagttggcatcaagggaaccaatggataccttagggcactggcaattctcaatacatagaaatgcttgagggttgtgtcggttcccctggccacagtttgtcaggttgtttagccagatgccccattggtaaggtagactgaaatctcggtttagggctgaccccaaaagaaacagtctggttcgtgctttggtatgg

SEQ ID NO: 1614 - DNA, 81 bp, Homo sapiens
acttgtaattagcacttggtgaaagctggaaggaagataaataacactaaactatgctatttgatttttcttcttgaaaga

SEQ ID NO: 1615 - DNA, 185 bp, Homo sapiens
actgctacttagtttctaaggctgcacagggaagggaaagactgggctttggacaatctagaggtaatttatatccgcccccaggtggagcaacatgcgattctggaggcacgggggtaactgaaagtgagtaaaaaaaaaaaaaaaaaaaaaaaaaaaaaaaaaaaaaaaaaaaaaaagcttgt

SEQ ID NO: 1616 - DNA, 419 bp, Homo sapiens
acatttatttcctaatttatacatgatttttggtgttaatatatttaatgattaataacagaatgtttatttaatgtgctgtccatttttatgtaatattatggggaaagtgatgccagcagttccttttcattattctatcttctgtcatatgaatgttgagcaaagcttaggccaacatgaattgtttgtgaagtgtggttgatggtgctttgtttttttctgactacttctatggaaggccagtgaagaagcaaaggaagacatgaaaattgacgctcattcttcttcctattgttccctgacatccagcaaattgtgaatttgaaaaatgatggccagttttcagaagtgctgacaaattcatattggtatgcaaaagctcatcacccattaaggtttgttgttgaatcaacagt

SEQ ID NO: 1617 - DNA, 545 bp, Homo sapiens
gtcgcgcccgggagtccgccgcctgcaccaggatggagttcgtgaaatgccttggccaccccgaagagttctacaacctggtgcgcttccggatcgggggcaagcggaaggtgatgcccaagatggaccaggactcgctcagcagcagcctgaaaacttgctacaagtatctcaatcagaccagtcgcagtttcgcagctgttatccaggcgctggatggggaaatgcgcaacgcagtgtgcatattttatctggttctccgagctctggacacactggaagatgacatgaccatcagtgtggaaaagaaggtcccgctgttacacaactttcactctttcctttaccaaccagactggcggttcatggagagcaaggagaaggatcgccaggtgctggaggacttcccaacgatctcccttgagtttagaaatctggctgagaaataccaaacagtgattgccgacatttgccggagaatgggcattgggatggcagagtttttggataagcatgtgacctctgaacaggagtgggacaagtac

SEQ ID NO: 1618 - DNA, 107 bp, Homo sapiens
  misc_feature 13, 14: n = A,T,C or G
tttaaaaatactnngatttccttcatactgggccaggaatttgacgaagtcactgcagatgacaggaaagtcaagagcaccataaccttagatgggggtgtcctggt

SEQ ID NO: 1619 - DNA, 400 bp, Homo sapiens
acaagtccaaagtttcactgaaaggcaatagagaaagtgatggatttagagaagaaaaaaattataaacttaaagagactggatatgtagtggaaaggcctagcactacaaaagataagcacaaagaagaagacaaaaattctgaaagaataacagtaaagaaagaaactcagtcacctgagcaggtaaagtctgaaaagctcaaagacctctttgattacagtccccctctacacaagaatctggatgcacgagaaaagtctaccttcagagaggaaagcccacttaggatcaaaatgatagcgagtgattctcaccgtcctgaagtcaaactcaaaatggcacctgttcctcttgatgattctaacagacctgcttccttgactaaagacaggctgct

SEQ ID NO: 1620 - DNA, 231 bp, Homo sapiens
acatagatgttgaatgaatgcgcaaaggactgtgagagtccagtggaaggaggattctttgtctaagcggcagagaggggaaatgaccaggagaatgtatctgatttgggccttggaggataagtaggagtttgctggatggaggagagaaacttaggcaaagagaaaagcaataaaaatgcaaggaaagggtgcttggaaagggtggcttgtccagaggctgaagcaggt

SEQ ID NO: 1621 - DNA, 320 bp, Homo sapiens
acaccttgttggaggcttcagtgacgacaggcagttgtcacaaaaactcactcatcaacttcttagcgaatttgacaggcaagaagatgacattcacttagtgacattatgtgtgacagaattaaatgaccgggaagaaaacgaaaaccactttccagtaatatatggcattgctgtcaacattaagactgcagagatttacagagcatcctttcaagatcggggtccggaggagcagcttcgtgctgcgcgaactttagcaggaggaccaatgattagcatttatgatgcagagacagaacaacttcgtataggaccgg

SEQ ID NO: 1622 - DNA, 187 bp, Homo sapiens
accttaaagcttataatttatttaaaatagtgctattgtgaacgaatgtcatgcttccacatgattcataatagaaattctaatattaaattaatttctctaagagttattacctatagttgaaaggtcataaaaatggaagcgagtaactgcgtgaatacacacacactcttttagtatattttgt

SEQ ID NO: 1623 - DNA, 474 bp, Homo sapiens
acaagtcataaacacagtgtgcagcagtgatgatccacaggggcgtgatgacagagcccccgcacaggtggtagccctggaactgaaggctggcctgccagggccactgcgagagcaaggacatgtttccacccacggtgcgtgagctgtagccccttctatgaccacaggctgtgcactgcaaggtaaccacgtggccagaggcacatccctccctcacatatactgagtggtgtaatgcagtcaccttgtcatctggcaagaggtgatcgatggacacaaactcctcccggaactgcccctccagcgagctcactctgaggttatctgaactcacatagcttgggaaacccagttgggcacaggcaacatttgcgtagtgacccttccagtcatcggagcacatggtcttccacgaagcagctgtgaacacctggagcacggcattctgaccacccacccggacacagcggt

SEQ ID NO: 1624 - DNA, 202 bp, Homo sapiens
  misc_feature 15: n = A,T,C or G
acaggtttcactatnacaaatatatgatgttaaactaacaaactcatgaccttcaaagatgtcttcgtcccacgcacacacatttgtaatttgtgtccatttgctatttcccttcttctataatcttcaaattatatagttatgcattgagttccctatgcatctcacccatctcctttatctcagccttctcatactttgc

SEQ ID NO: 1625 - DNA, 337 bp, Homo sapiens
acactaccaaggaagctgctgtgtgcagccatcgcacactgggtccccatgaggaaaggaactcagtcggcttaattggctgcggagcatcccaagaaccactgaaaaggcgccactgggctcctctgccagcttcagctacctgctggcaagatggttgtcattcagctaaaagcaagaagagctactcccatcaccagtgtttcccctaacctgtggggaagagcttgctaagacttactcatgctttgtttgtatctgcaggaaggggtcctgagtgaccactgaaagtcacttgccagcctggcttttctagtagccatagtggctgagtcac

SEQ ID NO: 1626 - DNA, 257 bp, Homo sapiens; identical to SEQ ID NO: 1118

SEQ ID NO: 1627 - DNA, 256 bp, Homo sapiens
atacgaagatggcacattttcacatagctgattttcaaccaaatgaaaaaaatcaagtgcatttcagaagcttttggaagagcagcttaattcctctcagtcgggaaatgttttctctgccttctgctttgcttgcaccaaacatttctaaacacttgttctgccatctacatgggaggtgatgaaactcagtggtaactcatgatttatgacattgaaaataaagaggaacattgacctgcagactatggtttgt

SEQ ID NO: 1628 - DNA, 218 bp, Homo sapiens
  misc_feature 13, 15, 200, 201: n = A,T,C or G
acgaaggcccaancnaaaaaccccgattttagatgtgatatttaggctttcattccagtttgttttgtttttttgtttagataccaatcttttaaattcttgcattttagtaagaaagctatctttttatggatgttagcagtttattgacctaatatttgtaaatggtctgtttgggcaggtaaaattatgtaatgcanngtttggaacaggagaat

SEQ ID NO: 1629 - DNA, 222 bp, Homo sapiens
gcggagacggcaaatggcggacttcgacacctacgacgatcgggcctacagcagcttcggcggcggcagagggtcccgcggcagtgctggtggccatggttcccgtagccagaaggagttgcccacagagcccccctacacagcatacgtaggaaatctacctttcaatacggttcagggcgacatagatgctatctttaaggatctcagcataaggagtgt

SEQ ID NO: 1630 - DNA, 224 bp, Homo sapiens
  misc_feature 13: n = A,T,C or G
actatgagaccancttcttcacaggttccacgagtcatgtcaacacagcgtgttgctaacacatcaacacagacaatgggtccacgtcctgcagctgcagccgctgcagctactcctgctgtccgcaccgttccacagtataaatatgctgcaggagttcgcaatcctcagcaacatcttaatgcacagccacaagttacaatgcaacagcctgctgttcatgt

SEQ ID NO: 1631 - DNA, 220 bp, Homo sapiens
cgggcgcagacggcggcagtgcggcttgctcttggaagttcaggctcggttgtcttttgggagccatggagagtgacttttatctgcgttactacgtggggcacaagggcaagttcggccacgagttcctggagtttgagtttcgaccggacgggaagttaagatatgccaacaacagcaattacaagaatgatgtcatgatcagaaaagaggcttatgt

SEQ ID NO: 1632 - DNA, 342 bp, Homo sapiens
gtgggcttgtgggtctttgagacccgaaaattgagagcgttttcgcactccagcggctgctcctggcggctctgcggccgtcaccatgccacagaatgaatatattgaattacaccgtaaacgctatggataccgtttggattaccatgagaaaaagagaaagaaggaaagtcgagaggctcatgaacgttcaaagaaggcaaagaaaatgattggtctgaaggctaagctttaccataaacagcgtcatgctgagaaaatacaaatgaaaaagactatcaagatgcatgaaaagagaaacaccaaacaaaagaatgatgaaaagacaccacagggagcagt

SEQ ID NO: 1633 - DNA, 528 bp, Homo sapiens
  misc_feature 40, 63, 73, 79, 87, 94, 148, 154, 178, 221, 253, 261, 266,269, 301, 319, 336, 357, 404, 417, 420, 426, 433, 454, 459,514: n = A,T,C or G
acaagctttttttttttttttttttttttttttttatcgncggggcattccggataggccganaaagtgttgngggaanaaagttanatttacnccgatgaatatgatagtgaaatggattttggcgtaggtttggtctagggtgtancctganaataggggaaatcagtgaatgaancctcctatgatggcaaatacagctcctattgataggacatagnggaagtgagctacaacgtagtacactcccacnaccacggnatggnctntttcatatggctcaagggtcaactgctcctgnggcttcatgttctcctgntgcatctttttcacttnggaggcaaacacggcctcggntgaggctgtggagtcaatgcagttggccttaatggaaatcacaaagngtcctccattacncangaaggngtgggcnttcagggccacaatccgggtntggtntggctgggccacatcagcaaagatcacatccaccattgcgatgaggcatgcggtntttgtgtgggtgtc

SEQ ID NO: 1634 - DNA, 502 bp, Homo sapiens
acctgtttctccctcattcggaaaatttcaaaatttgtgacaacaccctgggtgcctttcggagtcctatctactttcacacacaagtagtctccgttcttctgccaatggagcttgcagtccaccacattgaacaggttcctcactcggatctcttgcctggtagggagctgcatcagggttaccctggctggaatatctttgtcttcaggcacccagaaggcgattatgttaccaccaggagaccaagaaaagtcttttatcccagagatcttcaaactcttcttgtccaaaagacccatagaaggagtttcatagatgctaagcgtatccagggtcattctggcaaagaatttgccatcatggctccacttaaaaataggccaatgggctgagctctcacagtgaaaacccctcttcttgtgccccgtaaggatgtcccagatgattatggcctgagggtcatcctgcgtgtccatcagggggctaaaggtcaccaggt

SEQ ID NO: 1635 - DNA, 590 bp, Homo sapiens
gccgactcacacaaggcaggtgggtgaggaaatccagagttgccatggagaaaattccagtgtcagcattcttgctccttgtggccctctcctacactctggccagagataccacagtcaaacctggagccaaaaaggacacaaaggactctcgacccaaactgccccagaccctctccagaggttggggtgaccaactcatctggactcagacatatgaagaagctctatataaatccaagacaagcaacaaacccttgatgattattcatcacttggatgagtgcccacacagtcaagctttaaagaaagtgtttgctgaaaataaagaaatccagaaattggcagagcagtttgtcctccccaatctggtttatgaaacaactgacaaacacctttctcctgatggccagtatgtccccaggattatgtttgttgacccatctctgacagttagagccgatatcactggaagatattcaaatcgtctctatgcttacgaacctgcagatacagctctgttgcttgacaacatgaagaaagctctcaagttgctgaagactgaattgtaaagaaaaaaaatctccaag

SEQ ID NO: 1636 - DNA, 185 bp, Homo sapiens
  misc_feature 14: n = A,T,C or G
actcccgattgaancccccattcgtataataattacatcacaagacgtcttgcactcatgagctgtccccacattaggcttaaaaacagatgcaattcccggacgtctaaaccaaaccactttcaccgctacacgaccgggggtatactacggtcaatgctctgaaatctgtggagcaaaccaca

SEQ ID NO: 1637 - DNA, 194 bp, Homo sapiens
gacaaaatccagcatttctttatgattaaaccctcagcaaaattgtcatagagggacataccttaacataataaaagccgtctatgacaaacccacagccaacattatactgaacagagaaaagttgaaaggattcccctgagaactggaacaagagaaggactcccagtttcaccacttctgttgaacatagt

SEQ ID NO: 1638 - DNA, 476 bp, Homo sapiens
  misc_feature 13, 14, 405: n = A,T,C or G
acaaacttacagnnctgtatattccaaataaaggtttttcttcctactatggtatgacaatataactgttttctgaatgaagatacatgttaaggcttaaggtgtaaacactttggaaggcaaacagcttagtgaaaaaaattatggttcatttaaaaatgtgtatcatttcataatagacccctgaactttcaaatttacatgtgagaatacatttacatcttaactttctaggaaaggcacaggctttatgtaaaaaagcagcaaagttttaaacccaccaatatattgacaaagccattacttttattagaaacaaataatgcttctcaaggtgttggcaacatgtcatagtatcaacatatacttcatacagtgtatttctccctttaattatattccggnaggaggtggaatacctccttggctatgaggggcagatgtatttgatggactgtgtaggctggtctccttgt

SEQ ID NO: 1639 - DNA, 139 bp, Homo sapiens
aatcaatcgatcgatcgcgaaataccctttgtaagaaaacacacacacccactcacacacgcacgcgggaaaatgcaagacgagggtgactggaggcccagcagggttcgcgccgccgccgtctcctgctcgcagcact

SEQ ID NO: 1640 - DNA, 232 bp, Homo sapiens
  misc_feature 11, 12, 13: n = A,T,C or G
acttgattgannntcagagaaatatcacaaattagaaatattaaatctaaggatgaaaggtatatataaaacaatttgggggccaggcacgatggctcaaacctgtaatcccagcactttgggagaccaaggcgggtggatcacttgaggtcaggagttcaagaccagcctgggcaacatggcgaaaccctgtctctactaaaaatacaaaaattagccgggtgtggtggca

SEQ ID NO: 1641 - DNA, 326 bp, Homo sapiens
gcgagctccggaggaatttcagtatctgctacggtaacttcatcagcccgccaagatggcgatgcaagcggccaagagggcgaacattcgacttccacctgaagtaaatcggatattgtatataagaaatttgccatacaaaatcacagctgaagaaatgtatgatatatttgggaaatatggacctattcgtcaaatcagagtggggaacacacctgaaactagaggaacagcttatgtggtctatgaggacatctttgatgccaagaatgcatgtgatcacctatcgggattcaatgtttgtaacagataccttgtggttttgt

SEQ ID NO: 1642 - DNA, 303 bp, Homo sapiens
actgctttgtgtgcctgctgaggaagaacccgttgtaatctttgtagtagtgcttgtgctggaaagcaggcttttctgaagcccagctgcagaggtaactgttggtgttgatgtggtgcttggaacactagaactaatcaaatcatcttgtcttctaccaaaggagcaacttttatgatacgttgatccttcattaactgagctattttttttaagatcatcttcccattttctccttgtatatgaactacttgttcgcaaacttgaagaatctctgttttctttctcttcaatgtcagatgt

SEQ ID NO: 1643 - DNA, 324 bp, Homo sapiens
accgcctccttcccagccgcgcggcttcctccagacctctcggcgcgggtgagccctattcccagaggcaggtggtgctgaccctgtaacccaaaggaggaaacagctggctaagctcatcattgttactggtgggcaccatgtccttgaagcttcaggcaagcaatgtaaccaacaagaatgaccccaagtccatcaactctcgagtcttcattggaaacctcaacacagctctggtgaagaaatcagatgtggagaccatcttctctaagtatggccgtgtggccggctgttctgtgcacaagggctatgcctttgttcagt

SEQ ID NO: 1644 - DNA, 323 bp, Homo sapiens
acgtcatacaaaggaatatcattcagtaataaaaagaaattagctatcaagccatggaaagacttgaggaatcttaaaaggatattactaagtgaaagaagccactctgaaaagaccgcacactagatgattctaactacatgacattctggaaaaggcaaaaatgtggacacagaaaaagattagtgattgcctggtgttcagggagaggggaaaatgaaagaggtgacgcaaaggggatttttagggcactaaaactattctacatgatacagtaacaatgaatatatgccaccataccttcgtcaaaacccgcagaatgt

SEQ ID NO: 1645 - DNA, 480 bp, Homo sapiens
acggcgcacaatggaaaggagccagaagccaaaacagaagcataaccgttggtcgtggggaggctctctccatgggagccctagcatccacagtgcagatccagacaggcggtcagtttccaccatgaatctttcgaaatatgttgatcccgtcattagcaagcggctctcctcttcatctgcaactttactaaattctccagatagagctcgccgcctgcagctcagcccatgggagagcagcgttgttaacagactcctgacgcccacacattcgttcctggccagaagtaaaagcacagctgccttgtctggagaagcagcatcttgcagccccatcatcatgccctacaaagctgcacactctagaaattcgatggatcgaccaaaactctttgtaacaccacctgagggctcttctcgcaggaggaccattcatggcacagcgagctataaaaaagaaagagagagagaaaatgt

SEQ ID NO: 1646 - DNA, 215 bp, Homo sapiens
actattggtcagataatgttgttacactgaaaaaattcaccacatacaaagacaaatgcttgcccctagcacattcacagcttcaactgctacagactgtcactgaaaaaaatgcattggtcagtctgaaccatgtcaagtaaactatggaagtagcaaatccacaacacaaactgtgctagcactttcttttcaagtctaactccaaaataggt

SEQ ID NO: 1647 - DNA, 351 bp, Homo sapiens
  misc_feature 198, 199, 309, 310: n = A,T,C or G
acagctattatttgccatggaaaaggttagtctcatttagaaaaatcgaaagtgcacagcacttaaagggaatatatgaggttttttttttaaaaaaaaaacttttatttattatttgtagtatattgtctgaaatgtgttggcagttttttttcttttaatgtgtcaaatcttgaaatattaaatgtatacattttnngctatgttttgggaacaaatctgtttgatttatatagttttatattgaattttttttgccctgattgtttagggtgataggtcttaagcagcatatatctatatatctgnntgtgggtatatagagatatatgtgtgtgtgtatgtatatgt

SEQ ID NO: 1648 - DNA, 504 bp, Homo sapiens
  misc_feature 435, 436, 499: n = A,T,C or G
acattcaggacaaatgattagccctaaatgaaactgtaataatttcagtggaaactcaatctgtttttacctttaaacagtgaattttacatgaatgaatgggttcttcacttttttttttagtatgagaaaattatacagtgcttaattttcagagattctttccatatgttactaaaaaatgttttgttcagcctaacatactgagtttttttaactttctaaattattgaatttccatcatgcattcatccaaaattaaggcagactgtttggattcttccagtggccagatgagctaaattaaatcacaaaagcagatgcttttgtatgatctccaaattgccaactttaaggaaatattctcttgaaattgtctttaaagatcttttgcagctttgcagatacccagactgaggctggaactggaatttnncttcctattgactctacttctttaaaagcggctgcccattacattcctcagctgtccttgcanttagg

SEQ ID NO: 1649 - DNA, 577 bp, Homo sapiens
acaattccttgcttctttatgcaacctaacaaaataatatagaatgaagtcattagaaaaatatgaacctttctgaatctacattacatttttaatttaaattggaaaatacagtttagatcatatgaaacatatggatttcagacatgtattatctgtttctaacagattattacaggcggtctttattttggctgaaatgcaaaaatatgactttcttaataacagattagttaaaaatactttccattgatagcagtgctagtccctagaacaaaaggtaagcaaaacttatttgtaagttactgcctattcaatgcccagaatatgtagatcctaaatctaagcccttaatatacatctactttaaagataactgaaagatctcacatgcctgataatccttaatttaaaccgtcctgtaaacatagtcaaaatctgctaatagaaatacaattcaagtaaacattgcatatttgatttaaaccaccttacagttaaattcactcatgacacattggatcataaccactaatatgtaaaaagttttaaaaaaatcatccttacgtatagatga

SEQ ID NO: 1650 - DNA, 234 bp, Homo sapiens
actactgattattaagcaggacagactgagctttctgttgcaaataccttggaggagaaagtaatttctaaatatacagagaggtaacttgactatatatgttgcatcctgtgcctcccttcatattaatatttgataaagattttaatttatgtaaaacttctaaagcagaatcaaagctcctcttggggaaatggcaagtctttaggataggcaagaccctgtatgaatagt

SEQ ID NO: 1651 - DNA, 296 bp, Homo sapiens
accaaaggcaaaacattatacttaaaattaaattacagatgcatgaagaataaaagtttaatgtatcaaagataatttgttatttaatgcactcaatgtcagtatttggggcaatttttaaagttttcccaaaaaatggcatgaatagctctatacaataataggtaagaacaggaaaatgaaaacacctttataccatattttcacaaaccattctaaagacagcaaacttgagctcagctgcttttccttgctttaaaataagctaccagtaattctaaatcagactaaaatgt

SEQ ID NO: 1652 - DNA, 452 bp, Homo sapiens
  misc_feature 418: n = A,T,C or G
accttcattgcgatcaaaccagatggggtccagcggggtcttgtgggagagattatcaagcgttttgagcagaaaggattccgccttgttggtctgaaattcatgcaagcttccgaagatcttctcaaggaacactacgttgacctgaaggaccgtccattctttgccggcctggtgaaatacatgcactcagggccggtagttgccatggtctgggaggggctgaatgtggtgaagacgggccgagtcatgctcggggagaccaaccctgcagactccaagcctgggaccatccgtggagacttctgcatacaagttggcaggaacattatacatggcagtgattctgtggagagtacagagaaggagatcggcttgtggtttcaccctgaggaactggtaggattacacgagctgngctcagaactggatctatgaatgacaggagggca

SEQ ID NO: 1653 - DNA, 284 bp, Homo sapiens
gatctttatgtagaaggacttcctgaaggaattccttttagaaggccatctacttacggaattcctcgcctggagaggatattacttgcaaaggaaaggattcgttttgtgattaagaaacatgagcttctgaattcaacacgtgaagatttacagcttgataagccagcttcaggagtaaaggaagaatggtatgccagaatcactaaattaagaaagatggtggatcagcttttctgcaaaaaatttgcggaagccttggggagcactgaagccaaggctgt

SEQ ID NO: 1654 - DNA, 602 bp, Homo sapiens
  misc_feature 569, 578: n = A,T,C or G
acagaacatcgtcagcactagcacagtttacagaacctcacagacccaaaggaacatcaataggcaaagcgactacaggaggcgtgtgtccgcgtgggcgaggtaaagagggtcagtattggtcaagtgccagtgtcggtaatctggcaagacagtgatgttaagaaggttcatagtttaagaattatctaaaatattttaaaaactataaagctgcaacacatgatttttacacctagttactagaaaactaaggaaagcacttattagctctgaataaagtaacatggaaagcacttttactaatcgacaaaaaaaccttctaatgcattatcagaaagattttataatacaaggaggcatattgctcagtcagaaggggttctataagaaaagcacttactaagttagcgactaacagaacaaccagtttaaagatgaattaaatgcccaatttggggaggcatggcaggtgtaagagaaaggaaaagcttaagaaaacatttcctgataataccaacctttctttcatcatctactgcatttgacagaaattaaccttttagagnttttacccntgacactttcattccttgtacctg

SEQ ID NO: 1655 - DNA, 197 bp, Homo sapiens
actggccttgggcctcctatgatgcagacatggtgaatttaattcaaggaggaggagaatgttttaggcaggtggttatatgtgggaagataattttattcatggatccaaatgtttgttgagtcctttctttgtgctaaggttcttgcggtgaaccagaattataacagtgagctcatctgactgttttaggatgt

SEQ ID NO: 1656 - DNA, 173 bp, Homo sapiens
  misc_feature 79, 161: n = A,T,C or G
gtccaaatactcaactgccactcggccttcagtagagcttaatacataaccctgcttgtttggaaacgctcgtatgcancgagtctggtatttcaggctggactccctgcgctgctgcacgtaacccatgttccgtaagtcccacaccaacactctgcggnctgctgttccca

SEQ ID NO: 1657 - DNA, 435 bp, Homo sapiens
accaccagatacttaaagcttcaaaaagactgcccctaccaccacaggaggaccagcctaaccatacgctccaaaagatggctgtgatagatcttgtgaagcaattactgagcagatcaagatctttgggaaggaacactaaagatgttttgaatgaattatagtccactggcattttagtgtatttttttttctttttagaaacacacatttctaaaaatgtcatgttacattcctgcatgtcccttttgatagcattagtggatccattggatttcttttttctttttgtgagacagcttttagtcttacctgaatttatgtgtgtttttccgacagtggttaataattatattggtgatgtagcagcaattgtgttggcagggttttcatatattattagtaattaacactaactgttggactgacttgtgt

SEQ ID NO: 1658 - DNA, 128 bp, Homo sapiens
  misc_feature 9, 10, 11, 53, 68: n = A,T,C or G
ttttttttnnnttttttttttttatgggttctgcatctcgtttattagcacanaaataacaggtttanagtatattacaaaaagagctcaaactgttcaaatacagcaactgggcttactaggggaca

SEQ ID NO: 1659 - DNA, 296 bp, Homo sapiens
  misc_feature 15: n = A,T,C or G
acagttaaaaatganagcccaatacagggtattataaggaacaaggtataaaagagaggcaggcgcttgattacaaatgagtaagtgacatacggataccagcaacagctgtcggttctgtttcctttgctccctgttgcactcacaatctcccattctccattatcaaaaaaatctctcttgtctacatcttggtcctctagaattatatcaacctgtgatccatcataagtccaagaaccaaatttcatggaacagttctgaaggtcaaatgggaaaaacgtgacatctatggt

SEQ ID NO: 1660 - DNA, 581 bp, Homo sapiens
  misc_feature 421, 554, 559: n = A,T,C or G
actttactgcacccagcagactttcaacaactcattgatccaaagatacatgcacagtctgagcaccagctatggtgctcataacttctttaagacttgaaccctttcaatctgtgtgattcattaaattggaccattgatgatgagaatacacattgtatgtttctgtgcacatgacagtgtgtgtgtgtgcacgtacatactgtatagtcttaaaaatagcattatactggccaggggtggtggctaacgcctgtaatcccagcactttgggaggccgaggcgggtggatcaactgtggtcaggagtttgagatcagccaggccaacctggtgaaaccccgtctctactaaaaatacaaaaattagctgggcgtgatggtgggcgcctgtaatcccagctacttgggaggctgaggcangagaatcacttgaacccgggaggcggaggttgcagtgagccgagatcgcaccattgcactccagtctgggcaacagagtgagattccgtctcaaaaaaaaaaagaaaaggaaaaaatagcattatacctcttncttgnctcaaccgccatgaaaattctg

SEQ ID NO: 1661 - DNA, 118 bp, Homo sapiens
actgctatttattgataacatctttcgcttcacccaggctggttcagaggtgtctgcattattgggccgaatcccttctgctgtgggctatcagcctaccctggccactgacatgggt

SEQ ID NO: 1662 - DNA, 249 bp, Homo sapiens
acattaagaagagatccaaattacaagagaggcagataaaatttgaattctttaagcattcattaaacgaagttttggagtaacatccacgtttatcttcctttcactaatcacgttccctgttaagcacatcataacaacagcacagtgaagtgaatgatgaaataagagcattttgatacactagaaaacagtgctcagtgagacatttacattctatttatatgattaaacatttgatcatacagt

SEQ ID NO: 1663 - DNA, 545 bp, Homo sapiens
  misc_feature 487: n = A,T,C or G
actgtctgatttactacacagagaaactttttttttttaagatatatgactaaaatggacaattgtttacaaggcttaactaatttatttgcttttttaaacttgaacttttcgtataatagatacgttctttggattatgattttaagaaattattaatttatgaaatgataggtaaggagaagctggattatctcctgttgagagcaagagattcgttttgacatagagtgaatgcattttcccctctcctcctccctgctaccattatattttggggttatgttttgcttctttaagatagaaatcccagttctctaatttggttttcttctttgggaaaccaaacatacaaatgaatcagtatcaattagggcctggggtagagagacagaaacttgagagaagagaagttagtgattccctctctttctagtttggtaggaatcaccctgaagacctagtcctcaatttaaattgtgtgggnttttaattttcctagaatgaagtgactgaaacaatgagaaagaatacagcacaaccct

SEQ ID NO: 1664 - DNA, 529 bp, Homo sapiens
  misc_feature 389, 463, 507: n = A,T,C or G
acaatctcctgtttctttgccatagtggctttgatttgggattatatgcacccctttccagagtccaaacccgttttggctttgtgtgtcatatcctattttgtgatgatggggattctgaccatttatacctcatataaggagaagagcatctttctcgtggcccacaggaaagatcctacaggaatggatcctgatgatatttggcagctgtcctccagtcttaaaaggtttgatgacaaatacaccttgaagctgaccttcatcagtgggagaacaaagcagcagcgggaagccgagttcacaaagtccattgctaagttttttgaccacagtgggacactggtcatggatgcatatgagcctgaaatatccaggctccatgacantcttgccatagaaagaaaaataaagtagccaattctaaaagtagccctctttctcctggatcttgctgaattantggcttggggggtgggggagataaaaagaacttaaaaatgggtnaagtaagaaatgttaaaaaagt

SEQ ID NO: 1665 - DNA, 372 bp, Homo sapiens
accagcagtgcccaaaatctttaagccataagctctagcaatttggcatgctgttaatccaactcctccacttgccccatgaaccagaacactctctccagctttcacacaggcactgtggatcagagctcgataagcagtaaaatatggaatgccgatggcagctccttgtttaaagtccagtttttcaggtagtttgtaaacagtgtggtctgctgcaagagcatactctgcataacccccagagatcgtgctgctagtgaaaactctgtcacctttcttgaaagcagatgcattatctccaacagcttctatcaccccagccacatctgagccaggagtatagggtaagagtggttttctactataagt

SEQ ID NO: 1666 - DNA, 194 bp, Homo sapiens
acagagtggcatcaaggtgcggctacagctctaccgaacagccaagatgggctggggggtccgcgccctgcagaccatcccacaggggaccttcatctgcgagtatgtcggggagctgatctctgatgctgaggctgatgtgagagaggatgattcttacctcttcgacttagacaacaaggatggagaggtgt

SEQ ID NO: 1667 - DNA, 295 bp, Homo sapiens
atttttcacttgttgccccaaatgtgaaagcatttcattcctttaagaggcctaactcattcaccctgacagagttcacaaaaagcccacttaagagtatacattgctattatgggagaccacccagacatctgactaatggctctgtgcccacactccaagacctgtgccttttagagaagctcacaatgatttaaggactgtttgaaacttccaattatgtctataatttatattcttttgtttacatgatgaaactttttgttgttgcttgtttgtatataatacaatgtgt

SEQ ID NO: 1668 - DNA, 525 bp, Homo sapiens
acagaatactttcccatttagagggtgttcttcctgagtaatttagcctctatttcaggatccaggcacggcagatgatccccgcacatgaaatcataagtgcaaccagtgatggttacttttcctctctaaatgaggcagccacccctgccaaatggacgggtctccctgtgctctaaggctgctgctggtattgcccttccgtggctgtgtagaaatcatccaggacgctctgtaagtagtcaaacgttggtctctcttctgccttttctttccagcacattttcataatgtcatagagctcatctgggcagttctccacacggggcatcctgtagccctgggacagggcggtcatcacgtcggcattagttctccctgggtagggaattttcccataggtgacaatttcgtataggaggattccaaaggaccacacatcagacttaatagtgaaacatccaaagttgattgcttctggagccgtccacttaatagggaacttagcaccttcccttgctgtgt

SEQ ID NO: 1669 - DNA, 476 bp, Homo sapiens; identical to SEQ ID NO: 482

SEQ ID NO: 1670 - DNA, 389 bp, Homo sapiens
  misc_feature 280, 331, 371: n = A,T,C or G
actgatgtcaaccccagtgtttcctcatttactgagcatgtgtgactttcaaaaggctctgttactctcttgatttctgtgaggagcgagatagccatgactttaccctgaccatgtgactggaaacatactgaatattattggatggagaagttcacagtgtttcacaaacacatgacaagttattgttaacattatatgaatgggaggtggcaggtcaagtaaggccagagaagcattcaagctgacaccttgttcatgaatttaatctcttatgagnaacagctagaatgatcacagtggccagtttggtagcctgatcattttggtncatatgcagaaatgttctcaaatggactttgagagttagnaattagttggtatacagg

SEQ ID NO: 1671 - DNA, 315 bp, Homo sapiens
acccctttattgctcaaagaaagcaagccacaaacaataatgaagcaaaaaatggaatctaagaatctttttgtatggaatattacttctatcagaagatgatcaagatgtttcagtccagtgcacatcagcattgctgacattttatggattctaaacttgtgttgtttctttttaaatcaactttttaaaaaaataaagtgtaaattaaccgactagagtacaagcagactctgaagatgatcagacaaggcaaagcgaaattggtcattctcgctaacaactgcccagctttgaggaaatctgaaatagagt

SEQ ID NO: 1672 - DNA, 128 bp, Homo sapiens
  misc_feature 14, 18, 19, 109: n = A,T,C or G
acactgaatgatgnagcnnctgctctggttctcatgacggcagatgcagcgaagaggctcaatgttacaccactggcaagaatagtagcatttgctgacgctgctgtanaacctattgattttccaat

SEQ ID NO: 1673 - DNA, 530 bp, Homo sapiens
  misc_feature 11, 477, 482, 506: n = A,T,C or G
acttttagtanagatggggtttcaccatgttggccagactggtctcaaacttgtgaccttgagtgatccacctgcctcggcctcccaaagtgctgggattacaggcaagagccactatgcctggacctttattttatgtaatagatgttttatgatgtgaaaataggttgatatcttaaaaataggttttcctttctattccaattttgatatgaatgcatttctttgtattgtttttttctcaaataaatgaatcaagaaaccaagacaattggtccaatttgacgtttttcatttgatttaaaaaatgcagaaattaatatactgagtcccttttaagacagaggcctgctcgttaatgtaaaagcttggaaaagttatacaaagaacactccgaaaaataaagtttttgttattaacacaaatgattttgtaagaagcaaaacattttttttcaaaagcaggatttgttctaantctangttcacaaaggtattcatttctanaaatatcaacttaagactgtgaga

SEQ ID NO: 1674 - DNA, 551 bp, Homo sapiens
  misc_feature 530: n = A,T,C or G
acatgatacagattggttttgcagtttttaatgaactgaaatagaaatgtctaaatacagcagtatctgcctgtgcaacaaatatctgtaaggtaaaataaggtatttgatagaagaacatctgcaagaacaaatcagatgaaaaatctgaaaaggtttctatataccttctggattttaaaaaaacccaaaaattaatggctcaagatactacattgctaaagttaggggaaaaaagtaaaaaggctgtgagttctgttgcaagagctcatttgtagacttgcaaaatctaactaattttatattatgcttgttgttagagcagtgctcaaaattacagaagcttcaaattgttatgttttcacaaaatttgctacatatgttgacatgaatgtgtgtcagggaattcatacccaggtaaatgacaattacatcagtatagctaatttttgccaccttgggaggaatggaattctgcctattttcgaattaatcctacagcactcactaaaaaactaacagccatggcnccataatacattttgtgaggt

SEQ ID NO: 1675 - DNA, 279 bp, Homo sapiens
accattggtggccaattgatttgatggtaagggagggatcgttgacctcgtctgttatgtaaaggatgcgtagggatgggagggcgatgaggactaggatgatggcgggcaggatagttcagacggtttctatttcctgagcgtctgagatgttagtattagttagttttgttgtgagtgttaggaaaagggcatacaggactaggaagcagataaggaaaatgattatgagggcgtgatcatgaaaggtgataagctcttctatgataggggaagtag

SEQ ID NO: 1676 - DNA, 383 bp, Homo sapiens
actgggaaaatccagctgggatgtgacacagcttaactgatagcttaaggcatcagtattgggaccaaaggctggtcagatttgtatcattctgaggaccaaatgatgggaacaataaaattgttcatgacagttgttctcattttgctgtccagatgaagactcttaagatgacagaaggtgatttttctggtgatcgaggacttccggggtaatgacagtgatgaaatgcaggggacctggtaggtttcttttggagactaactgggggctgcctggtgggacagaacagcatgtttccaagggctgtggctggtcatagccatgggatctccaactgcatgcaagagcaacctggaaagactttgacagcgcaggtcagt

SEQ ID NO: 1677 - DNA, 312 bp, Homo sapiens
  misc_feature 170, 248, 263: n = A,T,C or G
acggtagaactgctattattcatcctatgtgggtaattgaggagtatgctaagattttgcgtagctgggtttggtttaatccacctcaactgcctgctatgatggataagattgagagagtgaggagaaggcttacgtttagtgagggagagatttggtatatgattganatgggggctagtttttgtcatgtgagaagaagcaggccggatgtcagaggggtgccttgggtaacctctgggactcanaagtgaaagggggcntattcctaggttttattgctatagcccattatgattattaatgatgagt

SEQ ID NO: 1678 - DNA, 234 bp, Homo sapiens
cttcagaagaggctcgcctctagtgtcctccgctgtggcaagaagaaggtctggttagaccccaatgagaccaatgaaatcaccaatgccaactcccgtcagcagatccggaagctcatcaaagatgggctgatcatccgcaagcctgtgacggtccattcccgggctcgatgccggaaaaacaccttggcccgccggaagggcaggcacatgggcataggtaagcggaagggt

SEQ ID NO: 1679 - DNA, 101 bp, Homo sapiens
accagaaactacctctgaaggctacactttccaagttcaggatggggctcctgggacctttaacttttagatcatgtagctgagacataaatttgttgtgt

SEQ ID NO: 1680 - DNA, 316 bp, Homo sapiens
  misc_feature 16: n = A,T,C or G
ttttgaaatataaacngagaggctttctgttgagacattgtcaccaaaacaattttttgaaatgttcctgaaactaatttgggtttaaagattaaaagggttgttaccattcttatctgagtagttgggaggaggggactaccactttagttcatttggaaaatatagacatatttcttttgctttcttaaaacagcttaaaatgatgaacttttataattttaatttgaagattgaataaatattttttataaagattgttttgagtgctgatttgtttactttttgtagatttgctttatccatgatattcagt

SEQ ID NO: 1681 - DNA, 610 bp, Homo sapiens
  misc_feature 277, 356, 363, 426, 445, 462, 520, 526, 573: n = A,T,C or G
acatacaagagacatattctttgacgtataaaaaatacagaaatatttacatgtatacaaaaatattaaaacagatttcagaaataaggaaaacaagcaagtttttacaaaggatactttcttgggaaatacacacaatgaaaaaaagctttagaaaggtgacaacacatttaatagactccagaagttgatatttctgttggtatcaattgagtaagaggaacataaaatgtctgaaatgctaacagatggaaaaccagacatatttaagactgtntaggtaaaattgcatgggtttcctttaccataaaattgaatcaatttttttttaccctcagtatcactatctacttttnctttttncttaaaatatttaaattgtttgatttgtattgagaattttaaactttttctcattaaaattgnaaaaatattttaaagaggntggctatcctctttatnttctggggggaaaaaaacctcaggatactacaccgatttcaacataaaattgaaaatnacaatncaattttttttaaagttaaaacctaacatttttctaactaaacattnatgatcagtaacaaattgatttaataagagatcacaa

SEQ ID NO: 1682 - DNA, 243 bp, Homo sapiens
  misc_feature 14, 15: n = A,T,C or G
actattttaatttnnattgaagaagttcagaaatttaaaagcagagcattttttatgatatcattgttggtgttaattgaaagtataatttgctggaacacaaagaccaaaatgaaagttttttcctccctgcttaaaaatgtagcagcttcttagttactttggaacactactcttacatgtataaagtgattgacttgactttctagcttcccttgtccggaggatattaaaatgctaggg

SEQ ID NO: 1683 - DNA, 304 bp, Homo sapiens
  misc_feature 218, 241, 262: n = A,T,C or G
aaatgccgctggagataaaccataaaatttgtgacactaacgtggcatggggtgaatcacataagctgctagctgttgaacaccagtgtttcaagatacaacttttataaacgttttatttgttttgcttataccatcagaactgaaactactgtccgtgatttccctgaaacagggaaatcaatctaaaacacatactggtgcctttcaaaagatangcaattgaaaagggtggtagcangcaggcatttggtatcttttncttttaaaaaaaagctttcaagctgaaggaaaaacatgtgac

SEQ ID NO: 1684 - DNA, 456 bp, Homo sapiens
  misc_feature 12, 372: n = A,T,C or G
caaacacaaaangcaagatgaaataaactgtttttttttctccagaaatctctactccagtgcccacagcacacaagagtcaaaacaaataagcaactaagatcccccgatcacaaatttccaaagaactggaggaggggaagaaacagggtgaaaatggtggtatgaaagggaatggatgttagcagcactgcttcaataactgatctattctggatgaaatacccttttttatgtgcagtaaattctgaacaaggctaaattttaggatattccttgaactgaaattagaaaataccctgacaatggaagcagctctttcatctaagtttaataagagcctctttctccatgggccactgttgtgaacanaagccttttctggcatcaaaagctgtcacagtagcccttccatctctttcatgaaagcctcatagacatcatccttaggtttgt

SEQ ID NO: 1685 - DNA, 279 bp, Homo sapiens
  misc_feature 8: n = A,T,C or G
aaacaganacaacttttcattggtggagaagcttgtctatggggagaatatgtggatgcaactaacctcactccaagattatggcctcgggcaagtgctgttggtgagagactctggagttccaaagatgtcagagatatggatgacgcctatgacagactgacaaggcaccgctgcaggatggtcgaacgtggaatagctgcacaacctctttatgctggatattgtaaccatgagaacatgtaaaaaatggaggggaaaaaggccacagcaatctgt

SEQ ID NO: 1686 - DNA, 572 bp, Homo sapiens
acaagaaacacatgactcttttcatatcaatgggagggacttttctacaaagtattttccaggatgcaacccacatttaaacaatgtaaaattctttgtttcctgcaacaacttacaaaataaggtaaaagactaaaattcaagatttgcttccttcattgtcctaagacgattcgttgagaatcactgactttgagatatttaaaactttaagcattatactgtggtttcttttgcactgcactcacctattcaggactcctcccccaggttcttcatcatgcacaaaaatgcaaagaaaacatcttattagtaattaatgaagcaacattgaaattctaactctagctgtctttggattctaattaactcagcatcaatttctcacctcagactacagtgaatttttatttcctatcagctgaaatatttcacagatggaagctcatgtttcagttttaatgactgccttgaataaacaagttgttgccacttgtttcaaacaaaagcctaaaaataatctacattcaattttaggctccattgactaatatggtgttgcttttggaagt

SEQ ID NO: 1687 - DNA, 179 bp, Homo sapiens
  misc_feature 142, 143: n = A,T,C or G
acaatcttaaaacctgtagttctcaattatagtaatatttcttacttccagtaatatgtctcaataccttggactgctggatgtcaaaagacaatacctgggggccatctatgagatctgaacaaatagaggaattctctannactgtatactctctattttggctttttgaatgaagt

SEQ ID NO: 1688 - DNA, 440 bp, Homo sapiens
accctgaccgcacagatggtcatagctgaacgagcctgaaggctggcaagttcattcctacctgacaggagatggctaaggctcaaagaaggtgatccaggcgagtgcagacctgggctggggcccagcatggagggcagcctggcccactatggcccactttgctatcctagggccccagggaaaggtatacttctttccacccaggaaagcctggccccaggacagctggctggctgggggaaggaggaagaagaccctcttgctccagaaatggccaacacagcaaatgcccaaacaactctttggttcagactagcaagcaaaggctgagagaggatcaatgtcttgcctgaagtcacacagcaatttagtggaggagccagaatggaacacagggctcttgacacccaatcttgggcaaaggactcagaggaggt

SEQ ID NO: 1689 - DNA, 347 bp, Homo sapiens
  misc_feature 46, 47, 51: n = A,T,C or G
actaatgatggcaaataatccatttatattttacaaaataaaacanntcantaatatatggctcatcctacctctgtggcaatacaaaatgccatttcaaattttttttaaaaagattgtgtgaatacttcgggtgagaataaaatataaaatactatctatataaagaataaacacataaaatacagtgtatgccttttaaaagtttggacagacgtatcttcatagagagatgcaaacaatgaaagtgtagttataggtccaaacttagccaaaatatgacagttttaatataatagtttgtttgaaaaaaagtagtcagacttcatccaaaccacccttgcggt

SEQ ID NO: 1690 - DNA, 315 bp, Homo sapiens
acatgaagtttctatttgattatgtggttttatatcacattcgttcaaatgcatttctctcccttagagggactattccaacatcactcctttggaattatttcagtcatccttaacatgtgactttaccaaagaccttgaagctaaacaaacaagcaaaacaaaatttcaatgactcttagatgaatggaataagaaatagtcatcacatgtcaattagggatgttcatctccaaccaagacactgtcaaaatgtttcttctgatacagcagttataagtcagagccttcaaaaaacaagggcagaacaagagt

SEQ ID NO: 1691 - DNA, 351 bp, Homo sapiens
accctagtaacaagtcatatcacgatcaataaatgatcacagcctttcgaaaaaactactgagattggagaatgggtttctgtctccaacccctgaaagacgttgctgcttcaagacctacagctccaagaagacaactcagaatttcttacttttaaaaaaatattgtcatgaataactgaataattagatttctaggaaaatgaggcttttaaattaagatttagcaaaatcaactataatgtatttacttctactcattgatgaatgacagaaatcagttaaagttttacatacaaaagatataaatactgcataatacgtagtgaatattggcacaaaccctttcgt

SEQ ID NO: 1692 - DNA, 373 bp, Homo sapiens
  misc_feature 358: n = A,T,C or G
accaactcttgtcaggctcagtggcagcttctacgacctgatggatggaaaaaaatcaaactctgtgactctatggttgactgccacctctgcaaccttgactcatctgctgaaaaggcaagaagaagaaagggcagcaagccctgttttagggactacataagatgaggggagataagggggacatagatgagttctttaggattgcgtgtgttttgagtttttgtttctaactgaagaaatctgtcaatattaaatagggtgggaaaatggtttcttagaataactgttcaactgtgtgtaaataaggaaagttttcaatgagtattacttattgtaattaatgcagaaggacttncccagtcaaaaaaaa

SEQ ID NO: 1693 - DNA, 537 bp, Homo sapiens
acttacacgtaagattttagcctatggtcattttataaagatgactgttaggatttaattcacatttaaagaaaatgagattcgttatattatggtgttttttatgacctataaaatacttacccctacaaatttccataaatgtagtggttagtaaagcttttttcttactgaaaaataatgccaggtaaccaagtattattccttccatcatttatttaggaaaaagttttatgtattagggtaaagtggtagaagttaacctagaatctaataatctccaatcacccattcctgatctaatagtagccatgagaaaaaatctctagaaagaatcatacctctcaaaaaataaaaaataaaacaaaggctgggtgcagtggctcacacctgtaatctcagcacttccggaagttgaggtgggcagatcgcttgagcctaggcatatcgcttgcagcctgggcaacgtggcgaagccgtctctaccaaaaaatacaaaaagtagccgggcatagtgacatacacctgagcccagga

SEQ ID NO: 1694 - DNA, 566 bp, Homo sapiens
actcgtttccacaccaagactcagactttttgagccaaaaaaaagccacattcttacactgtccagcttgtaatggttaatgtaaaacttaccagatgaaccttgtgtttcagcttttttcttttccccttccccttgcttcagaggcctgatggcgtcggactattccgaagaagtggccacctccgaaaaattccccttctagaacatgtagacacttgagaaatgtttctgtttgaagaaaatagagggagaaacagaagtcttaagtctgtggcacactgtgtcttcagacagtttgaaggaatgaaaacctagagattttaaatcatgaattgaacatgtaaaattccagtaaaatgtaaaaacggaatatgcatcgctcttaaccttgagcatagtgacttagagacactgtgtatcagttttgccaataagactgtggacttcatgattgttgttgaacttctgggtcaaaactcaaatgaggtgaattttgcctttaaagggtttatttgctgagaaccaactttcaaatagtcatgagagaatcaaataatagatgt

SEQ ID NO: 1695 - DNA, 223 bp, Homo sapiens
acccctttattgctcaaagaaagcaagccacaaacaataatgaagcaaaaaatggaatctaagaatctttttgtatggaatattacttctatcagaagatgatcaagatgtttcagtccagtgcacatcagcattgctgacattttatggattctaaacttgtgttgtttcttttttaaatcaactttttaaaaaaataaagagtaaattaaccgactagagt

SEQ ID NO: 1696 - DNA, 332 bp, Homo sapiens; identical to SEQ ID NO: 875

SEQ ID NO: 1697 - DNA, 414 bp, Homo sapiens
  misc_feature 219, 377: n = A,T,C or G
acttgttgttgctttgtttggagggtgtggtggtctccactcccgccttgacggggctgctatctgccttccaggccactgtcacggctcccgggtagaagtcacttatgagacacaccagtgtggccttgttggcttgaagctcctcagaggagggcgggaacagagtgaccgagggggcagccttgggctgacctaggacggtcagtttggtccctncgccgaataccacatgattaccactactgtcccgggagagacagtaatagtcagcctcatcttccgcctgagccccagtgatggtcaaggaagctgtgtttcctgagctggagccagagaatcggtctgggatccctgagggccggatgttaccatanatgacaactacaggggcctgtcctggcttctgctggt

SEQ ID NO: 1698 - DNA, 408 bp, Homo sapiens
actaccacagactgttgacttttagtttcttaaagagaaaaattgcctttttactagaaagcctttgtatattgcaatttttctgtttgggaaaatctaaggatttactgtggttagtcttacagaagaaatgtggatttgataaactagtgcctatgattttaacttatgtttgatatatagtagtaagggttttatgaatgttgattattttgtgccaacagcccagaattgtcacttatatgtaagcagaaaacaatgagctctgcttccaaagttatttaattttctcagtgtttgaatgttattttttgtaagtgtgttaataaaagtgtaaagaattggaaaaaatataaatattcttaactcaagcatttgctggatcatttttctacaaaacttgtttgt

SEQ ID NO: 1699 - DNA, 96 bp, Homo sapiens
acctgacagtgtaaagaaggagctcctacaaagaataagaacattccttgctcagcatgccagcctttaagattgaattagattgtgttgttgtgg

SEQ ID NO: 1700 - DNA, 257 bp, Homo sapiens; identical to SEQ ID NO: 1118

SEQ ID NO: 1701 - DNA, 271 bp, Homo sapiens
actgccggagttgaggattactgtgccagtaaatttggagttgtgggttttcatgaatccctgagccatgaactaaaggctgctgaaaaggatggaattaaaacaaccttggtttgcccttatcttgtagacactggcatgttcagaggctgccgaatcaggaaagaaattgagccttttctgccacctctgaagcctgattactgtgtgaagcaggccatgaaggccatcctcactgaccagcccatgatctgcactccccgcctcatgt

SEQ ID NO: 1702 - DNA, 492 bp, Homo sapiens
  misc_feature 362, 413, 454, 466: n = A,T,C or G
cttacactgttgctgctgcctctacgttcaatggcttccagaggccgacgatctactatgtgatgtcagggcctgcgtggcaactcatgcagcaattccagaaccccgacttcccacccgaagtagaggaacaggatgccagcaccctgcctgtgtcttgtgcctgggagagtgggatgaaacgccacagagcagcctgtgcttcggctagtattaatgtgtagatagcactctggtagctgttaactgcaagtttagcttgaattaagggatttggggggaccatgtaacttaattactgctagttttgaaatgtctttgtaagagtagggtcgccatgatgcagccatatggaagactangatatgggtcacacttatctgtgttcctatggaaactatttgaatatttgntttatatggattttattcactcttcagacacgctactcaanagtgcccctcanctgctgaacaagcatttgtagcttgt

SEQ ID NO: 1703 - DNA, 355 bp, Homo sapiens
accatttaagtcagtttcttatttgagtatgaggtgtctatacatttctataatttaagattttggtaacgcttcatatcaaatgagttgtagatctacttaacgtatgacttctcctttcaaagaaggaaggaaggctgacaagggagggagaagggatacctgctaatgatgatgtgctagaaagacgactcattacatgcttatcattgctggaaggacttcttccctccactgagccgtgggatgtcataagagcccttcgaagagctctttttggagttttggagaaagagaatgctcttgtaaccttttttgaagtcttttttattgctcttgatgctctactcaatgt

SEQ ID NO: 1704 - DNA, 350 bp, Homo sapiens
gcaaagacaaagaaacaaactacattggcatttaagccaatcaaaaaaggaaagaagagaaatccctggtctgattcagaatcagataggagcagtgacgaaagtaattttgatgtccctccacgagaaacagagccacggagagcagcaacaaaaacaaaattcacaatggatttggattcagatgaagatttctcagattttgatgaaaaaactgatgatgaagattttgtcccatcagatgctagtccacctaagaccaaaacttccccaaaacttagtaacaaagaactgaaaccacagaaaagtgtcgtgtcagaccttgaagctgatgatgttaagggcagtgt

SEQ ID NO: 1705 - DNA, 484 bp, Homo sapiens
cacagcgcctgcttcctcggccctgaaatcatgcccctaggtctcctgtggctgggcctagccctgttgggggctctgcatgcccaggcccaggactccacctcagacctgatcccagccccacctctgagcaaggtccctctgcagcagaacttccaggacaaccaattccaggggaagtggtatgtggtaggcctggcagggaatgcaattctcagagaagacaaagacccgcaaaagatgtatgccaccatctatgagctgaaagaagacaagagctacaatgtcacctccgtcctgtttaggaaaaagaagtgtgactactggatcaggacttttgttccaggttgccagcccggcgagttcacgctgggcaacattaagagttaccctggattaacgagttacctcgtccgagtggtgagcaccaactacaaccagcatgctatggtgttcttcaagaaagtttctcaaaacagggagt

SEQ ID NO: 1706 - DNA, 281 bp, Homo sapiens
accttcctgtttctcgcgccccggcttttaaaaactccccagctctggtccactactccaccgagatttctcaaaaagtcgccctcggagagtgatcccggggggtgctttgcgaagagggtgcagaaaatgaacggaggagcagctggcttgagggctgggaacactcgcgtgtgtgagagatttaggatgagtttgggaagaaagtgggggcccgaggattctagagagagcacagcccgggctgaggaggggaaagcgcggtggtccggaaatttgag

SEQ ID NO: 1707 - DNA, 332 bp, Homo sapiens
acagcattctggaataaagcaagagtgttcattcacacacacagtagcttcaaaactgttcgatctgtttgttcccatgtagttttctaaagatggaaaaaaaaggactttggtcatcaagactactgtggccatattagattactggaacatctaagcatcagtgtgtgaccatgcgaacaaaagacttcggggagtgtctatttttaaaaaggtttatgtgtgtcgaggcagttgtaaaagatttactgcagaatcaagcccacttttaggcttaggaccaggttctaactatctaaaaatattgactgataacaaaaagtgttctaaat

SEQ ID NO: 1708 - DNA, 237 bp, Homo sapiens
gtaaactgtagttaaagtgtccccactcgagaaaacaggaggcacaatcgaaagtgctttttacacacgtgtgcgcgcacacgcacaactaaaaacgtgattctgatttgttggaaattcttccaacaggaagaatcactgtaagttgttactactaaattaacttggttttatttattttcttttctagccaatactgatgcaagaaaatatttcaattctcaacctgattaatgt

SEQ ID NO: 1709 - DNA, 379 bp, Homo sapiens
acaaagccctaagcatgagtggaaaatcgttgcttcagaaaagacttcaagtaagtatatgacacttgccagattgttttcagcttacctatttttaagaaggagtgttgccaatttaatacctcttaaattgactactcgaggaaaaaactcagaagcaattaaatttggaaaacgagagcagattgttccagtctgggatgtggagactggagtccaattcaggatcatatacacaaaccaaaagtaataattacatcttaaacatggaactcttgtgcttacagataacacttacttgtgcctggctgtgctggatggtatattctgtgtcatttttcttcatgggagaaacagcccacagagctcaccaacaagt

SEQ ID NO: 1710 - DNA, 306 bp, Homo sapiens
acagattatgtgtaacagaacaatggctttttatgatttttttttaacattttaagcagactgctaaactgttctctgtataagttatggtatgcatgagctgtgtaaattttgtgaatatgtattatattaaaaccaggcaacttggaatccctaaattctgtaaaaagacaattcatctcattgtgagtggaagtagttatctggaataaaaaaagaagatacctattgaaaaatgtaagttttatttacagatcaggccacaggttacaaaattaaaaccaacagcagttttgaattatctgt

SEQ ID NO: 1711 - DNA, 210 bp, Homo sapiens
  misc_feature 70, 71: n = A,T,C or G
accccaaaattctgcatagattatttagtataatggtaagttaaaaaatgttaaaggaagattttattannaatctgaatgtttattcattatattgttacaatttaacattaacatttatttgtggtatttgtgatttggttaatctgtataaaaattgtaagtagaaaggtttatatttcatcttaattcttttgatgttgtaaacgt

SEQ ID NO: 1712 - DNA, 585 bp, Homo sapiens
  misc_feature 446: n = A,T,C or G
actcctagaagaaataacaaatttgtcatcccaggtggaagaaaactggacccatttgcaatcactcttcaatcaaagcatgtgtattttaaattatctcaaaagtgctttgttgtaaaaataaatttgtgactaaacaaagactttcatattaaatgggttcaattgaactcatttcttattttccaagtgtcaatgtgaaaagaaaataaatgctagcactactgactagtcagtatatctccactttaaatgctaaatactttcttgaaataaaatcgcacctcccggccaggcatgatggataatgcctgtaattccagcactttcagaggccaaagcgggaggattgcttgaagccaggaatttgagcccagcctgggcaacatagcaagcaagatcccatctctacaaaaagttaaaaaaataaattacacctgcctttngttttgaagacttaaagaatctgctcaaatgatttattttctgagtctcttcacattaacttttatatgatttttaaaaaaattattacctgcttatatttttttgagtatctgtttcatataaagagatgctgcatgt

SEQ ID NO: 1713 - DNA, 366 bp, Homo sapiens
acagcttctcaaatcatgttagaagggtctcacattcaatgatcaagaaattttaaaatagcagtaattattttcattttaagaaaaggttccctttctcccctcccaccccaagtatttaacatgaaagaatgggcttccttacatattaattttatacttatttttgaagcagcaacaattaaccatcaatttggcatttctgtttacagtcgctacaaaaattttttaaatttcacaaagccattatccagtgttgccatgaaacagagactgtaaattctaggtagctaagattctttctgaaaccaatgttaagtcaaagaaatataaagcagggcattacactaagtttctggatctagt

SEQ ID NO: 1714 - DNA, 126 bp, Homo sapiens
gaactgatagttactgttgtgacctgaagttcaccattaaaagggattacccaagcaaaatcatggaatggttataaaagtgattgttggcacatcctatgcaatatatctaaattgaataatggt

SEQ ID NO: 1715 - DNA, 586 bp, Homo sapiens
acacggaataaaagtcctactctctagaacatgagaagtcaataaatagaaaagatatacaaagtggaatgaacataaaaatgactaagcatgtgatcttcacattcatacagtttttcaactaatcttttacaattaaaaagtcatttatttgaaactgtagagttgatatatgccatattagtttggaaccttacaaaacaactttagtggtgttatttatgtgtggagagaaaactgtgtatgtaactatcatgtttcaagggacatgacttaacagtgaagttttttatgttatagggaagaaaacaagtattagtatcagttatcttagaaatgctatctaaactagaatgacatttgttcagtatgatatgttctttccctaactccattctaattgcttaaaaactatcaagtgaagttacaaaagttaaaccactaaatgtggcatcttttcttacacaaagtatcttctcttagaaatgcggtatttaattaagtaaaccttcttggtgaccccagttataatcaaaagaggccacgaaactacagactactgacgaaaagtgtcagtggagacact

SEQ ID NO: 1716 - DNA, 432 bp, Homo sapiens
acacgtctaccctctgcctcagcagatgcgagttgccttctcagcagccagaacctctaatctggcccctggaactttagaccaacctattgtgtttgatcttcttctgaacaacttaggagaaacttttgatcttcagcttggtagatttaattgcccagtgaatggcacttacgttttcatttttcacatgctaaagctggcagtgaatgtgccactgtatgtcaacctcatgaagaatgaagaggtcttggtatcagcctatgccaatgatggtgctccagaccatgaaactgctagcaatcatgcaattcttcagctcttccagggagaccagatatggttacgtctgcacaggggagcaatttatggaagtagctggaaatattctacgttttcaggctatcttctttatcaagattgaaagtcagt

SEQ ID NO: 1717 - DNA, 533 bp, Homo sapiens
  misc_feature 484: n = A,T,C or G
acagtggccctcagattctcagcttgattctaaggaactttcagctggttctcaatttgtaggactcatggcagttctcacagcatgtttttcaagtggctttgctggggtttactttgagaaaatcttaaaagaaacaaaacaatcagtgtggataagaaatattcagcttgtgtctttttccttggagccatccttgtaataacagctacttttttgtatggttatgatcccaaacctgcaggaaatcccactaaagcatagttgtatactatctttaactggtttttcacgatggggcactaggaatctcgacattaatcttgcacagaggacttctacagagtctgagaagatatcatcatgctgaatctgatcatactgttttttaaaagtttaaggataagatatgtgtatatgtaacaaaacacattgcatctagaaatcaaaacttgaaagtatttccagggattaggattagaangaatattagaggaaacttgaaatctgagtttaaaaagatttttaccttt

SEQ ID NO: 1718 - DNA, 586 bp, Homo sapiens
actaggttttctcttacctttgtaatttagaatttattggcagaaattacacacacacacatatatatatataactaaaaaaggtaaatttcagcaaacaaatgcaaacctgtagggtaaatggatttttaaaaaaaattcagtttatcaaatttcatcttctctgccattttagattggcaactattggttatttagaaaatttagactgctgaaagttcatttcttgctccttgaatatgtttaatttctacaaggcttccagttgtgcccgtagcttccttgaggtcattttccactttctcctctgtcactagatatcgtgcgtaagatatttatccttgatttggaaaagcctaaataaaaagcttccgttttgaccttttaatttataaaactccactaggaaatccatttaatttttatgcatgtccacaaaaatattttctttcttaggaatcaaacacttttattggaataaagatccttcaaagtttttaactcttctattagagttttattttgattttccaggactgcaactcggttttccaggcatttcacatattctttcttctttcacctg

SEQ ID NO: 1719 - DNA, 349 bp, Homo sapiens
acggagcaatcgaggaggcataaccacacttggggtggctatagggctggaaaacgctgaagatgactgctttcactgaggtcaaggattgtaatattgccagctttgtaaagtcattaaagcagaagtttcttcagtgatcttctctctaagaaacaccatcacccccatgtgccttacagaggccccctgcgttctgctgcattgcttttgcgcactcccttgatgatgaagatggtcccaataatgatgcccaccagacccacagtcaggcccagggcacacaccacgttctctgtagtctctgggagagggcttggagcatcaaactcccagtgcttgggaagag

SEQ ID NO: 1720 - DNA, 437 bp, Homo sapiens
acataagagccaccttgtaggctaagagtttaacgttgtttaaacacagcgtttgaggcaaacagtagcaacagcagcagcaaatgcaccaaactgacgaaaaggcccagatattttcctcactcatagtcagactgttgtgtctcaccccttacataacatccaagtgagatttctcacagtgctaccttggcaacaaactaaaaatatctagacaaggtcttggtttaagccttattaaaaagctttctttgtgattatctggtatctggtttggtctccagaaaatacatagacttggagataggaaggcctcacaggacttcattctatatctttacagcatttgcaatcaaaactggccagttaaatgctttcgttcacttttgaattttaacagaatataggatatatcagtttggacttgttttttgttg

SEQ ID NO: 1721 - DNA, 436 bp, Homo sapiens
acaaatatgaaaataaatctttatctttaacctcaattttatcttcagcaggagggttgtgcaacttgggtttatgcagatcacatcaagtgttaaataatcaaatgtcacatatgtcatataaagcagcaagtgaaaaaaataaattatgaaaatgcatgggctaaaagttaacagtgaaaaatatctccttatccaacattattttccacaatgaaattaaaatattttacaatgtatcaggatacatttaaaaaaggactgtagtataactatgattttaaaatatcttaaagaaaaacagggacaaggtgaataacttccatagtaatatgcaaatgtatcaagttaagtctaagataaaaacattaaatatttttgttcttactgaaaatgtgctttaaatttgagaacaccttcatgaaatcaaaacgtt

SEQ ID NO: 1722 - DNA, 488 bp, Homo sapiens
  misc_feature 400, 475: n = A,T,C or G
acagatactctactacactcagcctcttatgtgccaagtttttctttaagcaatgagaaattgctcatgttcttcatcttctcaaatcatcagaggccgaagaaaaacactttggctgtgtctataacttgacacagtcaatagaatgaagaaaattagagtagttatgtgattatttcagctcttgacctgtcccctctggctgcctctgagtctgaatctcccaaagagagaaaccaatttctaagaggactggattgcagaagactcggggacaacatttgatccaagatcttaaatgttatattgataaccatgctcagcaatgagctattagattcattttgggaaatctccataatttcaatttgtaaactttgttaagacctgtctacattgntatatgtgtgtgacttgagtaatgttatcaacgtttttgtaaatatttactatgtttttctattaggctaaattnccaacaattttgt

SEQ ID NO: 1723 - DNA, 473 bp, Homo sapiens
  misc_feature 107, 183, 271, 299, 332, 337, 345, 356, 387, 419, 425, 439,463, 470: n = A,T,C or G
cttttttttttttttttttttcatgggggcagacatgtttatttgaaggatggaaaactacattgaagttattttaaaaaatatataagttttactgctgacagaanactgaaagctagtctgaggggaggtggaacagcatgagggaaggtggaacaacacgtgtctaagtgctgcgttaanagggagcctcttgtatgtttggaattgtgagttcctcagtgtgattgcagcctcaagtagactaggaagtaagccagttaggttgganaggtgggcaggggtcaagtgaaatgganaactgtgggctaagcaaaggagtgtgttttttntccancaggcagnggggaccttanacatttgtaagcaagtgagaggcacattcanatttgtggtgtgaggaaaagcgatgccctaanatgcanactcatgccttcanattccagctgctggtaagcaaganacaggcncca

SEQ ID NO: 1724 - DNA, 572 bp, Homo sapiens
acttagcagtgaaatatttataggcaacagattttaagaagtcagttccatggctattaaaaaatgtttaagttaatgaaatttacagtgcatattaaaagcatgatacaaatggaaatttaaaattttgtattaggaagcccagtttgctaaaagtagcattaatatcattcacatcagattttaatttgttacacatttttgtagttcagcaaaggcccctatgatgaaaaacaattaaaaagtgttatgacaaaaataattatctgtgtaaaaagggggagacccaaaagatttttcatatggttatttaattcagttaaatagaactgttatgaatttgagaggaatgaagatattcaaacactaacagaaaatcattagccttatattagagcattcaaatgcttatgtaactcttcaatccatctggcttcataaaaaccaaaattttgaacacaaaaaagtggcagagtttacattaccttttgtatgttcctaagtatgaaattgcatcaatttattatgaattaaatttgaaaagcatcacagatttaaaaacaaagtacctc

SEQ ID NO: 1725 - DNA, 254 bp, Homo sapiens
accttttaatgtgtcaaatttcaaaaaacccatcacaggaaaaaatactgatctgttggatcctttaaaatacagataaatcattttatgttttttttaaaaaaatctgcattaagatattaacaactggctacaattcattacctaataatttaggtaagactgttatttatttttaaaaatccttttagttgggtgaaatccaagaagacttcattcaactaaatgcacttggtgctgctctcaactgttgt

SEQ ID NO: 1726 - DNA, 219 bp, Homo sapiens
ctcaaatactgtgaactatctctaaaacactagaaaaaagaaatgttagtatctcaattacaccaactgtgcaaatgaactttgataaaatagaaataatctacattggcctttgtgaaatctggggaagagctttaggattctagtagatggatactgaatactcaggcccacttaaattattaatgtatacattgtgtttttgtctttatgctatgt

SEQ ID NO: 1727 - DNA, 470 bp, Homo sapiens
actagcactatgatgtctcccagaaggaggctggtcgtgtgtccacctcatcatcagcgttatcttctgatgacaacagagaaggatatggagcgacacattttacgttcacataagtagcgttcacatggacatagtgctccccaatgaaagtagagaagattgctgatatccgggacaccagttcagaaaaggatgggcgcatttcggctttagggtgccagcattttagcattacttcatataaggggtctgggcagtattcgggttgtaggagtcttctcccttgcaacaagtaaacagttatatcaaaggtgtttacatcaggataaggtggggctcctcttgtcatcagctcccagaggagcacgccaaaggaccacacatctgacttggtggtaaacttttgagtttgcagactttccaaagccatccacttcactggcagctttgcacctgttttgttgtgt

SEQ ID NO: 1728 - DNA, 388 bp, Homo sapiens
acatctcatttttgcagaaaagtaggcaggcagaaagaattatacataaaagtttccaaaaggaaaaacaaagaaatatttaatctgatctcttttcttttaaaaaattaattcagtagacttctattttttcctgtgtaacatgggaattcctggctctaaaatggatgaattttcagtgtcagtgtaaagacatcttgttactttctttaaaataaaaactgcagcgtggaaattaatggtgtattacgcatttaaactccagataggcaggaactggaaccaagtgttaagcaatttgcttaattattgacttttcgtaagaaaagtctaggggaagggggagaacagagttgcttttagcctctctctcaagagtttctgctgt

SEQ ID NO: 1729 - DNA, 154 bp, Homo sapiens
actctttaacaactctgcttccttggacgggaattcatgaggtataatacttaaggagattttcatctgtaggttttaggattttcttatcggccatattcaccacccatcctggagcaagaccaaagaaaatctgccttggatccttcctagt

SEQ ID NO: 1730 - DNA, 206 bp, Homo sapiens
  misc_feature 32, 41, 97, 130, 143, 193: n = A,T,C or G
tttttttttttttttttttttttttttaaaanaaataatgnggtagtatttatttagggagagacagatgtgttgccatgttacttagtcatactanagagccagccaagtttgaataatgaaggtgcanacgtgttgtcttnttcactgacaagctgtctgaacaaggagccaggaactgtcgggtcaccanctgtggagtgtgc

SEQ ID NO: 1731 - DNA, 427 bp, Homo sapiens
acttgtaagtgttttggctggaatattctgctataggagaagacggacgtttcgtggagactactttgccaagaactacattccaccatcagatatgcaaaaagaatcacaaatagatgttcttcaacaagatgagcttgattcttacccagacagtgtaaaaaaagaaaacaaaaatccagtgaacaatctaatacgtaaagactatttagaagagcctgaaaaaactcagtggaacaatgtagaaaatctcaataggtttgaaagaccaatggattattatgaagatctaaaaatgggaatgaagtttgtcagtgatgaacattatgatgaaaacgaagatgacttagtttcacatgtagatggttccgtaatttccaggagggagtggtatgtttagcaaccactgaatgtgacttaactatgt

SEQ ID NO: 1732 - DNA, 555 bp, Homo sapiens
  misc_feature 414: n = A,T,C or G
accacattttcttcatccagctttgtgatactaaagaggccagttacttactacacattcaccaaaaatacagtggcaaaacaggaataatgtctctagacattcctgttgaaaaaaatgggaaaatgcacagactaaaagaatgattggtccaccacattttaaaatcccagtggtaaatgttgcaagtcatttgattatattcaacgcctgtgaataattattcatgcctctcatctctgacctctaggctcttcgttctgccttttgagttattcttttttttttttccatgaaatacagctggtaccataaattttttcaatcttagtgtaaaatctgtatctcattgtaggcttctggtcaatacctatacataacaacttaatgtgatctaaccaactcaactgatanaaagctgaattgttcccagtggacaagtggtatttgatgtttagcaggtttttttgttgttatttttttggtaaactctgtggtaaaatctaaaataatgttaaaaccctaaaagtaactattgaatattctgtaatctta

SEQ ID NO: 1733 - DNA, 321 bp, Homo sapiens; identical to SEQ ID NO: 1095

SEQ ID NO: 1734 - DNA, 354 bp, Homo sapiens
accattctggctgagcagtggaacttgtctaggatggtatcgacaatgcaacattattccttatagcaaagatgttgacctaggaatttttatacaagattacaaatctgatattattttagcatttcaggatgcaggacttccgctaaaacacaaatttgggaaggtagaagacagcttggaactatccttccagggaaaagatgatgtaaaacttgatgtttttttcttctatgaagaaactgatcacatgtggaatggaggcactcaggccaaaacaggaaaaaaattcaaatacctgtttccgaagtttacactgtgctggactgagtttgtagacatgaaggtccatgt

SEQ ID NO: 1735 - DNA, 374 bp, Homo sapiens
accttagagttcctggccagagttgactctaggtagtgatgtgattttcttgggatgtttttctaaatattcttttatgctaaagcacatggcttgatacttctgttgattaagctcgtgtctacttacagtcatctagtgagaacctgtggtgtggtgagatgataacttggtctttggtcttcatcatttgaactagttttggttttgtcttgtcccttccttgagcattttgtgtgtgtctaatcctatttggtaaacgaaccactgtgaaagaccaagttggagaaaacagaacacccccaaaacatttattttttttttagaaaatcatggctcactatggtagtatacaatattgttttcacacatgt

SEQ ID NO: 1736 - DNA, 197 bp, Homo sapiens
  misc_feature 38: n = A,T,C or G
gttttaggactttaatgttctttacatattcaacatanaatactgacaatagataaacaataggggaaagacttttcagcaaagtatcactctcgtagtcatacattacaaagaaaacagtagagaacaaaggatagggtaatttaacagaaatgtttagtttaatggcataattgaaaaacaaccaaccaatcaac

SEQ ID NO: 1737 - DNA, 541 bp, Homo sapiens
atctgtgatccagcaagaagggagttccagtcaagagtcactacaactgattagttgtttagagaatgagaaatggaacagtgaggaatggaggccatatttccatgacttcccttgtaaacagaagcaacagaagggacaagaggctggcctctacatcactctcaccttccaaatcttgtggaagtgcatctacttgccagaaccaaattaacttacttccaagttctggctgcttgcaggtggaactccagctgcaagggagttagggaaatgaaggtctttttttaaaagcttctcagccttcctagggaacagacattgggtgagccaatctgcaatttctactacaggcattgagaccagttagattattgaaatattatagagagttatgaacacttaaattatgatagtggtatgacattggatagaacatgggatactttagaagtagaattgacagggcatattagttgatgaaatggagtcatttgagtctcttaatagccatgtatcataattaccaagtgaagctggt

SEQ ID NO: 1738 - DNA, 576 bp, Homo sapiens
acttcttcgatcttcaccttttgtgctgtgattcttcagtttctaaaccagcactgtctgggtccctacaatgtatcaggaagagctgagaatggtaaggagactcttctaagtcttcatctcagagaccctgagttcccactcagacccactcagccaaatctcatggaagaccaaggagggcagcactgtttttgttttttgttttttgttttttttttttgacactgtccaaaggttttccatcctgtcctggaatcagagttggaagctgaggagcttcagcctcttttatggtttaatggccacctgttctctcctgtgaaaggctttgcaaagtcacattaagtttgcatgacctgttatccctggggccctatttcatagaggctggccctattagtgatttccaaaaacaatatggaagtgccttttgatgtcttacaataagagaagaagccaatggaaatgaaagagattggcaaaggggaaggatgatgccatgtagatcctgtttgacatttttatggctgtatttgtaaacttaaacacaccagttgtctgttcttgatgcag

SEQ ID NO: 1739 - DNA, 368 bp, Homo sapiens
  misc_feature 352: n = A,T,C or G
acaaaaaaaagcacattcctagaaaaaggtattggcaaatagtaaaaatgggaggtcaaaagcaaaaaaaaaaaaaaaaaacaaaacaaaaaaaagaaaaaaccaacaattcttcaattcagtgtgcaaacattatataaaaatagaaatactaactctacaagcagtatttcctgataaattatttaaatagcatatctacacaatctgagatatctattccaatggcaatgagaaaataatttataaaaataaagcaatggtataccagatgatagaaaaaaaacataactttcagaaattgtatttaacatttcaatgctatttccttattgggaatacttctctgcanagtttttatgctatgt

SEQ ID NO: 1740 - DNA, 553 bp, Homo sapiens
  misc_feature 546: n = A,T,C or G
acatactatgttcatgatagtgtgatttttttcacatttaagcaggaatgcaatataaaaatgtgaatctcttaattctcaggcatgtgcttattatatttctttttagattgtctatctgtataacacacacacacacacctaagagtctctatttcacaattatatttttgtaaatagtatatgcatttttaatacattggaggctttattttgaactaatttcttagagaatagttatattttctattacacaagtttaaaaatattattaacttgtattttcttaatatacaatctatcttttccacaaatatgagtgggaaataaatcagcacatttgaaagaaagtgttaaaactgaaggcctcacttaattagaaacgtgataaatatatggacaaatggactatacatactataagaggactgtagtttaatactttttacccaaatatgtttaaaaacttcgtgcatttgttacagctcatgttttctatatgaacttagtcattaatgttctttataaaaagtgaaataagatggnaaaataa

SEQ ID NO: 1741 - DNA, 190 bp, Homo sapiens
  misc_feature 12: n = A,T,C or G
actgacttcatnaaagccatctcagagccattgatacaagtcaatcttactatatgtaacttcagacaaagtggaactaagcctgctccagtgtttcctcatcattgattattgggctagctgtggatagcttgcattaattgtatattttggattctgtttgtgttgaattttttaatcattgtgcaca

SEQ ID NO: 1742 - DNA, 269 bp, Homo sapiens
ggcctttccacttggtgatcagcactgagcacagaggactcaccatggaattggggctgagctgggttttccttgttgctattttagaaggtgtccagtgtgaggtgcagttggtggaatctgggggaggcttggtccagcctggggggtccctgagactttcctgtgtaacgtctggattcacatttactgatcattggatgagttgggtccgccaggctccagggaaggggctggagtgggtctcaggtattagtggtagtggtggt

SEQ ID NO: 1743 - DNA, 301 bp, Homo sapiens
acaaacagtatttctggtgtatattttaatgtttttaaaaagagtaatttcatttaaatatctgttattcaaatttgatgatgttaaatgtaatataatgtattttctttttattttgcactctgtaattgcactttttaagtttgaagagccattttggtaaacggtttttattaaagatgctatggaacataaagttgtattgcatgcaatttaaagtaacttatttgactatgaatattatcggattactgaattgtatcaatttgtttgtgttcaatatcagctttgataattgtgt

SEQ ID NO: 1744 - DNA, 169 bp, Homo sapiens
acggaaagaacttaataagatattagaagggagaagcaaaatttctgtcaatgacttcatcataaaagcttcagctttggcatgtttaaaagttcccgaagcaaattcttcttggatggacacagttataagacaaaatcatgttgttgatgtcagtgttgcggtcagt

SEQ ID NO: 1745 - DNA, 266 bp, Homo sapiens
acatggcatttttctgtttatttctcaaagaatttgggtcaacttgtgggaaagtttagaaaatttcacttcagcctcagtagcttgacatctttttagtagtttgaagtgcttaaaatggtgaaaatttctctcgctgtttctttaatgtagtatttttcttaagaaaccgttttttccagaatgaagataaatttcagcttagatcatgcatgaagaaactcgttttaaattggaagagtttatgctaatgatatttatgctgc

SEQ ID NO: 1746 - DNA, 135 bp, Homo sapiens
acttatagtgactctactgtttgaaatactatttttttaaatcaagttttataaaagtgtagaattttggcttttttaagttatgttgttagcacacaggacacttccttgttgtcttttgtggaaagggcaagt

SEQ ID NO: 1747 - DNA, 482 bp, Homo sapiens
acccagcggaggtgcagtgtttaaaaaggatgatattggacgaaggaatgggcaagctccaaatgagaagatgaagcaagtgttaaagaagactatagaagaagccaaagcaataatatctaagaaacaagtggaagccggtgtctgtgttaccatggagatggtgaaagatgccttggaccagcttcgaggcgcggtgatgattgtttaccccatggggttgccaccgtatgatctcatccgcatggagtttgaaaataaggaagacttgtcgggaacacaggcagggctcaacgtcattaaagaggcagaggcgcagctgtggtgggcagccaaggagctgagaagaacgaagaagctttcagactacgtggggaagaatgaaaaaaccaaaattatcgccaagattcagcaaaggggacagggagctccagcccgagagcctattattagcagtgaggagcagaagcagctgatgctgt

SEQ ID NO: 1748 - DNA, 486 bp, Homo sapiens
acagatactctactacactcagcctcttatgtgccaagtttttctttaagcaatgagaaattgctcatgttcttcatcttctcaaatcatcagaggccgaagaaaaacactttggctgtgtctataacttgacacagtcaatagaatgaagaaaattagagtagttatgtgattatttcagctcttgacctgtcccctctggctgcctctgagtctgaatctcccaaagagagaaaccaatttctaagaggactggattgtagaagactcggggacaacatttgatccaagatcttaaatgttatattgataaccatgctcagcaatgagctattagattcattttgggaaatctccataatttcaatttgtaaactttgttaagacctgtctacattgttatatgtgtgtgacttgagtaatgttatcaacgtttttgtaaatatttactatgtttttctattagctaaattccaacaattttgt

SEQ ID NO: 1749 - DNA, 339 bp, Homo sapiens
gagaaaaagatctaaagatcttttattttcatcttttttggttttcttggcatgactaagaagcttaaatgttgataaaatatgactagttttgaatttacaccaagaacttctcaataaaagaaaatcatgaatgctccacaatttcaacataccacaagagaagttaatttcttaacattgtgttctatgattatttgtaagaccttcaccaagttctgatatcttttaaagacatagttcaaaattgcttttgaaaatctgtattcttgaaaatatccttgttgtgtattaggtttttaaataccagctaaaggattacctcactgagtcatcagt

SEQ ID NO: 1750 - DNA, 259 bp, Homo sapiens
acctacttcagatgaacgaggcgcaagacaaaatccaggacttgcctatggaaacccatattctggtatccaagaaagttcttcccccagcccgctctccatcaagaaatgccctatctgcaaagcaaatgatatttgcgatcacaccttggagcaacagcagatgcagcccctttgtttcaattgtccaatttgtgacaagatcttcccagctaccagagaagcagatctttgaagaccacgtgttctgccactctct

SEQ ID NO: 1751 - DNA, 257 bp, Homo sapiens; identical to SEQ ID NO: 1267

SEQ ID NO: 1752 - DNA, 76 bp, Homo sapiens; identical to SEQ ID NO: 1488

SEQ ID NO: 1753 - DNA, 359 bp, Homo sapiens
acaacatttaaaatactatatttagtaatccagaagctactgggcacctccttcatctaccatgactgcattgcaaaactccaaatcggaacagcctcttgctataaaaaccgtgctaacgtgtcagggaagtccccgagtaattcagaagctagaatccatttgtgcccacaagcagtgttggtcttcccaaaataggccctcaagaatgccactttcctcttacagcctcgctgcctaaactgactgttggcataacctgagaatttgggggcaatcagcaaagtggggaataggcaggacatttttctaaatgtattgatttgtttatttggatgtttatcaatagataccgaagt

SEQ ID NO: 1754 - DNA, 594 bp, Homo sapiens
  misc_feature 216: n = A,T,C or G
acccaaatgtgtttgggattggggactgcaccaaccttcctacgtcaaagactgctgctgcagtagctgcccagtcaggaatacttgataggacaatttctgtaattatgaagaatcaaacaccaacaaagaagtatgatggctacacatcatgtccactggtgaccggctacaaccgtgtgattcttgctgagtttgactacaaagcagagccgntagaaaccttcccctttgatcaaagcaaagagcgcctttccatgtatctcatgaaagctgacctgatgcctttcctgtattggaatatgatgctaaggggttactggggaggaccagcgtttctgcgcaagttgtttcatctaggtatgagttaaggatggctcagcacttgctcatcttggatggcttctgggccaaaactgcagtcactgaatgaccaagagcagcacgaaggacttggaacctatccttgtaaagagttccttgatgggtaatggttgaccaaatgcctcccttttcagtacctgccccgggcggccgcccgggcaggtacaataaataattatttaaaagtcatagctccagtcactactgaaa

SEQ ID NO: 1755 - DNA, 352 bp, Homo sapiens
acaatacagaaaatacaggtcagttctggaccaaaataattgcattaaaatacaaaaggtgatagggaagaattaaaagatttgcagtgactgcttttggtggtcagctacaacaagccaacaaccctcagctattttggaaagtgaaggtgagtcttaatttgcagataatgaatgtcttcggtagtttaaaaaaaatataaactctaaaaaagctcgtgaatcatatacaaaagcagctatttgagaccaaggttgaacaccagaaattgtgttagcaccaccagcaagcacagggtcctctgactcttccgccctcctatcttgtgcagaatgcagacttgaatgttgt

SEQ ID NO: 1756 - DNA, 159 bp, Homo sapiens
ctcgcccagctcgcccagcgtccgccgcgcctcggccaaggcttcaacggaccacaccaaaatgccatctcaaatggaacacgccatggaaaccatgatgtttacatttcacaaattcgctggggataaaggctacttaacaaaggaggacctgagagt

SEQ ID NO: 1757 - DNA, 255 bp, Homo sapiens
acagaaatagtaattagcaatgttctgctgaaggagaaagatgtttatctgaaaaagctggttaactattaaataacacattttcttttgaatttttaaaggaagtataataaaattgaccaataaacttttcacgaccataagcttctatataaaaaatttgatttaggtttatcttaatattctaaaaaagtatttgcactctaaaataggtctgggagttaaaatcatgtaggctgtttttcagtcttgtgt

SEQ ID NO: 1758 - DNA, 581 bp, Homo sapiens
acaggcattggcacattttaaaaacaaactacataaacagatctttcctataacctaggaaagtggaatgtcagaagtcaacaaaatgtgataaacttaaagtgctaaaacagaaggcacttcacaaaatctgttcactgaaacagttatatatcctcgtttacatccttcactttacaagtggcagtgaacgtctgtttggatagaaggacatacagaaatacaggcagtttagtggcagtaaaaatataagacaagtaatgagtccttggccaacttgtttttgatgacctgtagtgtcctttaactttcctccttaagaagaaaaaacagaaggattcacaattagaagaaaagttgaaatccagaatatagttacttttgggagtggggacgtttgtggatattaaatcacttatcccctaaagcaatcagagccctttgtttttatggttgaagttttgtgaagtaaagaaagtattagggaagaacacttcagaatcagtgaactaaaaaaggtgttacattcattattttaaatatttaggttattaagaagtctaaaatgttacacagttaga

SEQ ID NO: 1759 - DNA, 147 bp, Homo sapiens
actacgtgccagctctagttttcagccttgggaggttttattctgacttcctctgattttggcatgtggagacactcctataaggagagttcaagcctgtgggagtagaaaaatctcattcccagagtcagaggagaagagacatgt

SEQ ID NO: 1760 - DNA, 477 bp, Homo sapiens
acattgaaaaaaggaaagacatttcttcataccaacctttccctagttcgcagtttctgaatagtagaaacaaaacacatttttaaatctttctatcaatttaatttaggacgaagtaacacaacttttataattaaccactgaagttgtctttaaggacaaaacttaaattttaaaatgggtgttaccatattttatgagtggactgactccaaggttgccttgctccaagtctgggcatcgtgacattgccgtgatgcccagaagaaagttaatggcaatgatgtccagtcagagggcagacatgctacacatcacaatgatgagagctgcggattctgccctcttcaactccaagtagaaaattattattttcattcaaactaactggaagtgagccaaacagttaaaaagtcagaatgaagaataaaacaattttcttttcacatagaggagggacactccttcagccccgtc

SEQ ID NO: 1761 - DNA, 345 bp, Homo sapiens
acacttgaaaccaaatttctaaaacttgtttttcttaaaaaatagttgttgtaacattaaaccataacctaatcagtgtgttcactatgcttccacactagccagtcttctcacacttcttctggtttcaagtctcaaggcctgacagacagaagggcttggagattttttttctttacaattcagtcttcagcaacttgagagctttcttcatgttgtcaagcaacagagctgtatctgcaggttcgtaagcatagagacgatttgaatatcttccagtgatatcggctctaactgtcagagatgggtcaacaaacataatcctggggacatactggccatcag

SEQ ID NO: 1762 - DNA, 219 bp, Homo sapiens
  misc_feature 11, 117, 118, 144, 156, 157, 167, 168, 180, 181, 182: n = A,T,C or G
actgccaccanattttttattacatcatttgaaaattagcagtatgcttaatgaaaatttgttcaggtataaatgagcagttaagatataaacaatttatgcatgctgtgacttagnnctatggatttattccaaaattgcttngtcaccatgcanngtctgtattnnttatatatgtgnnnatatatacataatgattataatacataataagaatga

SEQ ID NO: 1763 - DNA, 292 bp, Homo sapiens
  misc_feature 11, 12, 45, 192, 250: n = A,T,C or G
actacaaatgnntgccataaaacctactatactcgtcacacaggntttaagactttgcaagaattgtcatcaaatgatatgcttttacttcaacttagaactggaatgacactttctgggaacaatacaatttgctttcatcatgtaaaaatttacattgacagatttgaggatttacagaagtcatgttgngacccatttaacatacacaagaaattagccaaaaaaaatttgcatgtaattgacttanatgatgccacttttctgagtgctaaatttggaagacagcttg

SEQ ID NO: 1764 - DNA, 150 bp, Homo sapiens
gcaactccatgcaaaccatccaaaagaccaccacccgccggatagtggatggcaaagtggtgtctgagaccaatgacaccaaagttctgaggcattaagccagcagaagcagggtatcctttggggagcccgaagccaataaaaagttca

SEQ ID NO: 1765 - DNA, 463 bp, Homo sapiens
  misc_feature 9, 321, 344, 402: n = A,T,C or G
actgcaacnactgctatctcagattcaaatctggacggccaaccgccatgtgatgtaagcctccatacgaaagcactgttgcagatagaagaagaggtggttgctgctcatgtagatctataaatatgtgttgtatgtcttttttgctttttttttaaaaaaaagaataactttttttgcctctttagattacatagaagcattgtagtcttggtagaaccagtatttttgttgtttatttataaggtaattgtgtgtggggaaaagtgcagtatttacctgttgaattcagcatcttgagagcacaagggaaaaaataanaacctacgaatatttttgaggcngataatgatctagtttgactttctagttagtggtgttttgaagagggtattttattgntttttaaaaaaaaggttcttaaacattatttgaaatagttaatataaatacataattgcat

SEQ ID NO: 1766 - DNA, 336 bp, Homo sapiens
acatattcaccttgaagaggaagacggggcggaagaccaagatcatcgagatgatgccagaattccagaaaagttcagttcgaatcaagaaccctacaagagtagaagaaattatctgtggtcttatcaaaggaggagctgccaaacttcagataataacggactttgatatgacactcagtagattttcatataaagggaaaagatgcccaacatgtcataatatcattgacaactgtaagctggttacagatgaatgtagaaaaaagttattgcaactaaaggaaaaatactacgctattgaagttgatcctgttcttactgtagaagagaagt

SEQ ID NO: 1767 - DNA, 553 bp, Homo sapiens
actagtgatattttgggtgttttttttaaatgaatgtatatactttttttttgaagagtggagagtagtgatgtctagagggagctattttgtgctgaggccactatgttctgtaaatatataattttaagagcaacctcacaatccctgctaagtggagtttattatttgaagactaaaatggaattccatagttcctgataggttatattctgagttattattctgagttatctacaaacatttttgagatttgtctttacactctgattgtagtttccagcagcccatgcacactgccaagtaagtctcattttttcctgttagaaatggtgaaatatcatataatcacttataaagaaaactgatatgaaaaaattttagagttgtttgctttatggtcactcaagtagggtaagtgttccacaaattccacaagttgatagtttaacatggatgtctgaaagccacatatataatttcttaggattcttaaattagtaaatctagcttactgaagcagtatttagcatcactattttagattgcaaaa

SEQ ID NO: 1768 - DNA, 501 bp, Homo sapiens
acactttgagacgcaggaagcagctgaaagagctattgaaaaaatgaatggaatgctcctaaatgatcgcaaagtatttgttggacgatttaagtctcgtaaagaacgagaagctgaacttggagctagggcaaaagaattcaccaatgtttacatcaagaattttggagaagacatggatgatgagcgccttaaggatctctttggcaagtttgggcctgccttaagtgtgaaagtaatgactgatgaaagtggaaaatccaaaggatttggatttgtaagctttgaaaggcatgaagatgcacagaaagctgtggatgagatgaacggaaaggagctcaatggaaaacaaatttatgttggtcgagctcagaaaaaggtggaacggcagacggaacttaagcgcaaatttgaacagatgaaacaagataggatcaccagataccagggtgttaatctttatgtgaaaaatcttgatgatggtattgatgatgaacgtct

SEQ ID NO: 1769 - DNA, 348 bp, Homo sapiens
  misc_feature 305, 316: n = A,T,C or G
acccatcctggatgccaatcagctggaagtcattccttttgatgttggggacatccatattatgagttgacgggcagatatcttcatatttcttcccagtaaagatgtcaataccaaccagatggaccttggcgtggccgtgcttgccagtcttcgaagtagacatctcgacgatcttacatggccggcctttgagcaccacaaagccattcttacgtaatgctgagcactgcattgggaaggtggctgaggcccctgcatctcctgtctcgaagtccaagtcatctgccattttaagaggcttngattccaactngcgcgaacgcactgactcgaccccgtacctcg

SEQ ID NO: 1770 - DNA, 423 bp, Homo sapiens
  misc_feature 191, 196, 197, 204, 236, 359, 380: n = A,T,C or G
actgagatacatggggccgaaaaggggtaatatggccatcttttatcagaaaaagtgacaaaacgggaatttaaaaaatgaattttccatctgactttatttccaaatacactttcttttttaaaaaaccaatacactttctttgaggatgacagtattaggaaatccaattatacaaaaaatactacatntagtnnggggtanatatatttatttgttggtaacatacattaagnggcactaattacacagtaactataaggtaactaacatgaaaccacagaactgtaactctgccacagctgcatgaacttgggcttttctggttgagcccattttcaaaaaactgcccaccccanagctatgccaacaaaatctgntacggagtaaagccctgaagtggtgactcaccaggagtacctg

SEQ ID NO: 1771 - DNA, 541 bp, Homo sapiens
acacttgaaaccaaatttctaaaacttgtttttcttaaaaaatagttgttgtaacattaaaccataacctaatcagtgtgttcactatgcttccacactagccagtcttctcacacttcttctggtttcaagtctcaaggcctgacagacagaagggcttggagattttttttctttacgattcagtcttcagcaacttgagagctttcttcatgttgtcaagcaacagagctgtatctgcaggttcgtaagcatagagacggtttgaatatcttccagtgatatcggctctaactgtcagagatgggtcaacaaacataatcctggggacatactggccatcaggagaaaggtgtttgtcagttgtttcataaaccagattgaggaggacaaactgctctgccaatttctggatttctttattttcagcaaacactttctttaaagcttgactgtgtgggcactcatccaagtgatgaataatcatcaagggtttgttgcttgtcttggatttatatagagcttcttcatatgtctgagt

SEQ ID NO: 1772 - DNA, 201 bp, Homo sapiens
acaaagttggctatgtgaccctgatgcaatggagcagggagaaacacctttaacaatgcttcagagtcaggttcccaacattgttaaagctcttcacaaacagatgaaagaaaaaagtgtgaagacccgacagtgttgttttaacatgttaactgagctggtaaatgtattacctggggccctaactcaacacattcctgt

SEQ ID NO: 1773 - DNA, 505 bp, Homo sapiens
gttttttgaagacagacacagtgcaatcaaactgaggccgaaggaaggggagacatactttgatgttgtggctgtcgttgaccctgtcaccagagaagcacagagacttgctcctttgctcttggttttggctcagctgataaacatgaatctgagagtatttatgaactgccaatccaaaccttctgacatgcctttaaaaagcttttaccgttatgtcttagaaccagagatttctttcacttcagacaatagttttgctaagggtccaatcgcaaaatttttggatatgcctcagtctccactgttcactctgaatttgaacacacctgagagctggatggtagaatctgtcagaacaccatatgatcttgataatatttatttagaagaggtggacagtgtagtggctgctgagtatgagctggaatacctgttactggaaggtcattgctacgacatcaccacaggccagcctccacggggactacagtttaccttagga

SEQ ID NO: 1774 - DNA, 446 bp, Homo sapiens
gcaaattccagtgtgcagaccacaacctcaaaacaaaaaagatctatttctactggatctgcagggagacaggtgccttttcctggttcaacaacctgttgacttccctggaacaggagatggaggaattaggcaaagtgggttttctaaactaccgtctcttcctcaccggatgggacagcaatattgttggtcatgcagcattaaactttgacaaggccactgacatcgtgacaggtctgaaacagaaaacctcctttgggagaccaatgtgggacaatgagttttctacaatagctacctcccaccccaagtctgtagtgggagttttcttatgtggccctcggactttggcaaagagcctgcgcaaatgctgtcaccgatattccagtctggatcctagaaaggttcaattctacttcaacaaagaaaatttttgagttata

SEQ ID NO: 1775 - DNA, 251 bp, Homo sapiens
  misc_feature 8, 10, 198, 199, 214: n = A,T,C or G
aagagttnancggaaaggggaaaggatgataaagacaatgtcatgagatgtcagagaaaatactaatttcataatgcagctcaacaatagaaatcaatttcaaaatgaaatatgatgcataaactaagattaaagttagttaatgtggctgggcatagcagatgggactcttagaagaggtggcctccagggtggcanngccattgccctggcntcaggctcctgttccctcctgggcccaccaagttcac

SEQ ID NO: 1776 - DNA, 204 bp, Homo sapiens
acacactttcatttagtaattaaattttagtcagattttgcccaacctaatgctctcagggaaagcctctggcaagtagctttctccttcagaggtctaatttagtagaaaggtcatccaaagaacatctgcactcctgaacacaccctgaagaaatcctgggaattgaccttgtaatcgatttgtctgtcaaggtcctaaagt

SEQ ID NO: 1777 - DNA, 351 bp, Homo sapiens
  misc_feature 14, 15, 218, 219, 309: n = A,T,C or G
aatacattctcatnntacaaaggcaatttaatggaagaatcttccttttgatatttgaatcatctgaaataacacaaacagaacaatacattcaaagaaatctcatttgcataacaaaaagacaagttaaacaacaaaaaaatttttcctttctcacaggtggacattgaagtggacctaattcggttttccttttaaaagccccgcaaacaaaagtnngtttaaaacctatttaaaatgaataaaaaattggtttactaaactactggtctccagcaccattttctgttttctgttgtttggatgcangttcttctttgtctagtttcttctcttgctcttttcacaggt

SEQ ID NO: 1778 - DNA, 344 bp, Homo sapiens
tcctgttcgacagtcagccgcatcttcttttgcgtcgccagccgagccacatcgctcagacaccatggggaaggtgaaggtcggagtcaacggatttggtcgtattgggcgcctggtcaccagggctgcttttaactctggtaaagtggatattgttgccatcaatgaccccttcattgacctcaactacatggtttacatgttccaatatgattccacccatggcaaattccatggcaccgtcaaggctgagaacgggaagcttgtcatcaatggaaatcccatcaccatcttccaggagcgagatccctccaaaatcaagtggggcgatgctggcgctgagt

SEQ ID NO: 1779 - DNA, 414 bp, Homo sapiens
attttttttagtagagatggggtttcaccgtgttagccaggctcatcttgaactcctgacctcaggtgatctgcctgccttggcctcccaaagtgctgacattacaggtgtgagcccctgtgcctgaccaaagtgaatgctttctaatccatttctgcttggagccttgaataaacatacataagggattctgatgaaaatgtccagaatgagactctggcatctgcatttttaacaagctcttaggtgactctgctttatatccagagttgaaggcccctggtctagacagggtatctaagaatcaccagggtaaagaagaatttttccaatacatttctggttccctaaaaagatattgtctggagaaaatcatgtagttggaaatgtgcttgcgagggattggaggctgtt

SEQ ID NO: 1780 - DNA, 392 bp, Homo sapiens
  misc_feature 14, 16, 282, 298, 315, 329, 368: n = A,T,C or G
acaagtctttgatngnagtagagtataagcctgtgtcggccactggagctgaggacaaagataagaagaagaaagaaaaagaaaataaatctgaaaagcagaataagcctcagaaacaaaatgatggccaaaggaaagacccttctaaaaaccaaggaggtgggctctcatcaagtggagcaggagaagggcaggggcctaagaaacagaccaggttgggtcttgaggcaaaaaaagaagaaaatcttgctgattggtattctcaggtcatcacaaagtcangaaatgattgaatacncatgacataaagtggcntgttatattcttcngtccctgggcctatgccatttgggaagccatcaaggacnttttttgatgctgagatcaagaaa

SEQ ID NO: 1781 - DNA, 195 bp, Homo sapiens
acttgttgttgctttgtttggagggtgtggtggtctccactcccgccttgacggggctgctatctgccttccaggccactgtcacggctcccgggtagaagtcacttatgagacacaccagtgtggccttgttggcttgaagctcctcagaggagggtgggaacagagtgaccgagggggcagccttgggctgac

SEQ ID NO: 1782 - DNA, 385 bp, Homo sapiens
actcaacctaagttcggttccgatgaattcttatcccctgccccttcctttaaaaaacttagtgacaaaatagacaatttgcacatcttggctatgtaattcttgtaatttttatttaggaagtgttgaagggaggtggcaagagtgtggaggctgacgtgtgagggaggacaggcgggaggaggtgtgaggaggaggctcccgaggggaaggggcggtgcccacaccggggacaggccgcagctccattttcttattgcgctgctaccgttgacttccaggcacggtttggaaatattcacatcgcttctgtgtatctctttcacattgtttgctgctattggaggatcagttttttgttttacaatgtcatatactgccatgt

SEQ ID NO: 1783 - DNA, 192 bp, Homo sapiens
  misc_feature 172: n = A,T,C or G
aagatccatgctaaattccccatcctgcagcagtgagtcccggatcaccgaacatttctggcccccaagtgtcagcccattcacgtaaaaacttgaccggtctttgccaaccaggacacccacctcagctggcgtgatgttgacgaacgttttcccggggacggcggcccanacggagggcgagtccttgta

SEQ ID NO: 1784 - DNA, 602 bp, Homo sapiens
actgccgcaaggcttcacagacagcccccattacttcagtcaagcccaaatttcatcctcatctgttacctatctcagcataattctcataaaaacacaggtgctctccctgctgatcgtgtccgattaatctcccaaacctcaatcccttacaaaagaacaactcctttccttcctaggcatggttagtgtggtcagaattcttacacaagagccaggactgcaccctgtagcctttctgtcgagcacatcaaggcttatgtcaccaaatcccccgttgatgcaggcaaagctgtgattgtcattcaagatatatttggctggcagttgcccaataccagatatatagctgacatgatctcaggaaatggatacacaaccattgttccagacttctttgtagggcaagagccttgggacccctctggcgactggtctatcttccctgagtggctgaaaacaagaaatgcccagaagatcgatagagagatcagtgctatcttgaagtatctgaaacaacagtgtcatgcccagaaaattggcatcgtgggattctgctggggtggaactgctgtccatcatttgatgatgaaatactcaga

SEQ ID NO: 1785 - DNA, 250 bp, Homo sapiens
acaaccgcttgggaaaagatccgtttcttagcaaactaaacctatacctaccatataatctaagaattcgaatcctaggtatttctcaagagaaatgatattatttagattccatttatacgaagttctgaaacagaaaactaatctgcggtgggaaaacagttaagacagctgttgccttgagagggtgtgaatggagaccgactgagaagagacatgaggcaactccaaagtgatgcttatagtctgt

SEQ ID NO: 1786 - DNA, 91 bp, Homo sapiens
  misc_feature 62, 63: n = A,T,C or G
acttgtggaagatggccacgaggaggccaatggcctgatccagggggcatgccatggctganngctgggcttggagcggtagggaggcggc

SEQ ID NO: 1787 - DNA, 370 bp, Homo sapiens
gcgcagcagctgtgcccggcagtctagaggcgcagaagaggaagccatcgcctggccccggctctctggaccttgtctcgctcgggagcggaaacagcggcagccagagaactgttttaatcatggacaaacaaaactcacagatgaatgcttctcacccggaaacaaacttgccagttgggtatcctcctcagtatccaccgacagcattccaaggacctccaggatatagtggctaccctgggccccaggtcagctacccacccccaccagccggccattcaggtcctggcccagctggctttcctgtcccaaatcagccagtgtataatcagccagtatataatcagccagttggagctgcaggggt

SEQ ID NO: 1788 - DNA, 249 bp, Homo sapiens
acactgaagcagaaccggaaacacccaggaactgttcagaaatctcagaagaaatctgcttctcttcgatggaaagatataattaacgatcaaagagctctaagaaaattgcaaagaagccttaatgttcaagctttagaaagatcagagcaatttttctctttcagtccaaactaagactctctgtatttaaatctctctggggcaagagggctagatttcctcattttgttatgagactagattggt

SEQ ID NO: 1789 - DNA, 346 bp, Homo sapiens
acagagagaggaagaagctattcagttggatggattaaatgcatcacaaataagagaacttagagagaagtcggaaaagtttgccttccaagccgaagttaacagaatgatgaaacttatcatcaattcattgtataaaaataaagagattttcctgagagaactgatttcaaatgcttctgatgctttagataagataaggctaatatcactgactgatgaaaatgctctttctggaaatgaggaactaacagtcaaaattaagtgtgataaggagaagaacctgctgcatgtcacagacaccggtgtaggaatgaccagagaagagttggttaaaaaccttggt

SEQ ID NO: 1790 - DNA, 529 bp, Homo sapiens
  misc_feature 233, 249, 393, 441, 516: n = A,T,C or G
acatgccctttatgaagatattcttgagggaaaacaccaccaagcaagtgaaacacataatgtgattgcatcagacaaagcagcagaaaaatcagttgtccatgaacatgagcacagccacgaccacacacagctgcatgcctatattggtgtttccctcgttctgggcttcgttttcatgttgctggtggaccagattggtaactcccatgtgcattctactgacgatccanaagcagcaaggtctancaattccaaaatcaccaccacgctgggtctggttgtccatgctgcagctgatggtgttgctttgggagcagcagcatctacttcacagaccagtgtccagttaattgtgtttgtggcaatcatgctacataaggcaccagctgnttttggactggtttccttcttgatgcatgctggcttagagcggaatcnaatcagaaagcacttgctgggtctttgcattggcagcaccagttatgtccatggtgacatacttaggactgagtnagagcagtaaaga

SEQ ID NO: 1791 - DNA, 379 bp, Homo sapiens
accccgccatggccgccatcaatgcacgcaagatgaaatttgctctgctaaaaggctccttcagtgagcaaggcatcaacgagtttctcagggagctctcttttgggcgtggctccacggcacctgtaggaggcggggctttccctaccatcgttgagagagagccttgggacggcagggatggcgagcttcccgtggaggatgacattgacctcagtgatgtggagcttgatgacttagggaaagatgagttgtgagagccacaacagaggcttcagaccattttcttttcttgggagccagtggatttttccagcagtgaagggacattctctacactcagatgactctaccagtggccttttaaccaagaagtagt

SEQ ID NO: 1792 - DNA, 283 bp, Homo sapiens
acccttggggaacacaaatacacttagcatataatgtagccagtaataactagcaccacagctacatggaaatcctttacatacaccaacttggctttcacttttaaaacaaaactcagaatccatggctcagtaggataactataattgtgttgctctgctttttaacaggtctacataagttaatagcactagcaaaaatcaaagaatagcttcagacctcttacaagtttaggagacagtgctagtgaccacaaatagactcactacctgatgtccaagt

SEQ ID NO: 1793 - DNA, 340 bp, Homo sapiens
acatggtgacttgggttttgtttctgcatctgtcacttggcgaatgaagataccatcttcaggatgttctgtgtcatccatttcatacatatatgatgacgctattacaagcgtagtcccatcattactgaaggcaagtgatgcgatgctcgtggggtaccgatggaattggcacagtcgctttttgttaaatggatcccaaatatttacaaagccatcagaaccacctgtggcaaatgtattgtggatattgtgaaaagaaatggcattgactgggtaaatctgctcaatattattttcttttagtctgtgacatttgaaggcatacttcttcttctgt

SEQ ID NO: 1794 - DNA, 345 bp, Homo sapiens
acattcacaacttatgtttctttgagattaatagatattgggggaaaaacgcctttttaggaaaattatagtgaaaatttgacagttgattggcataatttcttgtttgaatgctgcctccattatataggtccttccaggaactcaaacactgtaagtgaaatatgggagtatagtttttattatttcttcttttccttttgttttcataatataatgcagtttgttcaggaaatcagcacaaagcctgatagtacacactgtgacctgatcatcctgaaaaactttatgggggagaaaggtcaacagcttctctttctttttcttgaaaataataaaactgcg

SEQ ID NO: 1795 - DNA, 256 bp, Homo sapiens
  misc_feature 228: n = A,T,C or G
cgcagccatgagtatgctcaggcttcagaagaggctcgcctctagtgtcctccgctgtggcaagaagaaggtctggttagaccccaatgagaccaatgaaatcgccaatgccaactcccgtcagcagatccggaagctcatcaaagatgggctgatcatccgcaagcctgtgacggtccattcccgggctcgatgccggaaaaacaccttggcccgccggaagggcangcacatgggcataggtaagcggaagggt

SEQ ID NO: 1796 - DNA, 178 bp, Homo sapiens
  misc_feature 12, 72, 73, 104, 105, 117, 126, 146: n = A,T,C or G
acctgtcacacnacgtccacctggtgtgcgaggagacagccaattacctggtcatttggtgcattgacctannggtggaggagaaatgtgcactcatggagcanngtggcccaccanacaatcgtnatgcaatttatcctggagcntggccaagagcctaaaggtggacccccgggcc

SEQ ID NO: 1797 - DNA, 313 bp, Homo sapiens
accttacatttagttaaatataaacatttgttatttatacataaaactgctttcaaaaaacaactaataaatgatttaattgcacttgttttacttcttgtaattcccaagtgttaacttttcttagattgaaatcaactgtcccctagtgcacttttatttttagttcgtgtcctaataaattcaaacctttaaaagtcccatcacctaatgcataaatatacaaaaatgccaaaaattaatcccttttagttggatcatattttatgctgactttttatagccaaataaccagaaatggtttccttctgca

SEQ ID NO: 1798 - DNA, 447 bp, Homo sapiens
gctcaacattgacatcccccgatctaggattactctggacctcattcgggtgttatgagtatcccacgaaggccagacgctgattttattttctcatttccacagattgacaaggataagtcagttgtttgtaaactctaggtagcagatgagaaataattcacttaatatcagaaatattttccaaacactttcctttattttttcttctgaataaatagaaaaccaacagtttgatttccttttcccttaaaggaaacaactaatacacattcttatatggctttatgtagtaatagttttctgactaaaattttgttttttattttttgtaatttatctttaactccttttgcattttgtataacagattgcttaacttctacttgccaacatctgccttgctggacttgtatgggattgtcttcttgatttgaattgtacctc

SEQ ID NO: 1799 - DNA, 321 bp, Homo sapiens
actgaatacttcggcaaacttattgggtcttcattttctgacagacaggatttgactcaatatttgtagagcttgcgtagaatggattacatggtagtgatgcactggtagaaatggtttttagttattgactcagaattcatctcaggatgaatcttttatgtctttttattgtaagcatatctgaatttactttataaagatggttttagaaagctttgtctaaaaatttggcctaggaatggtaacttcattttcagttgccaaggggtagaaaaataatatgtgtgtcgttatgtttatgttaacatattattaggt

SEQ ID NO: 1800 - DNA, 422 bp, Homo sapiens
  misc_feature 271, 303, 355, 362: n = A,T,C or G
acatgtttggaaatgagttagatacttgaaaagtctaaacacactgatttaggagtgcgtatgttgctgtctcaatgaacaatgggtcaatagttcatatggactaaattaatctctgggtagcacgtatgtgtgtaaatataaaattatattagacattagcaccagtgcagaacatgctcagcatcataagatccaaaacaccagcacaagtttatccatcattaaaaacaattacctccttcccaaaatgtcagaatagtaggtaacntgagattaataaatcttatccaaaaagtaacntcttataacataaaagtttcttttagaagtatatgtgaggaaccaatcagcntaaatangaaatgttttaaggattgaagatgtccaatattttttaaaactggacattaccatataca

SEQ ID NO: 1801 - DNA, 429 bp, Homo sapiens
  misc_feature 407: n = A,T,C or G
acagtaatttgcagtaactacagatactgttccacagtatatataattatgactgataagatgtagagcattaaatttagagttagcttattctgataagtcaatattagactgttcattaactctgcattaactatagaaaggttgttagttaatgcttatttaaaaaccccaaaccattccatttacaagagaaattgttgcaaatgtataaaacagcagatatacaaggagaacaccaaacatactttattagcacaaaaaaagcagccataacaaggcacagcaagcagaaacatacattagcagtcaaaaggttagtgttgcatacaaatatagctttccttttttgtagccttggcaatagccatagggatgtaaaataacattctgtagcagcaggtaangaaactatggagcactcaccag

SEQ ID NO: 1802 - DNA, 311 bp, Homo sapiens
acaaaacaacaaaatatatatatattctcatatatatatatatagctgataaaattacctgaggagtgtaatgcttatttttttgtgtatatctttgcaatctattttatatatattgacaaaagagactgtgaaatacttagccatgcagaatatgtgaccagaccagagcatgtgtaggaagactttacggtaatcatcaactctaccccgaaatgatggactacaagttataatgtgtgttacctacacttcaatcagtaatattagcaaatctccaaatgttagtcacattggtttgtctcccttgt

SEQ ID NO: 1803 - DNA, 279 bp, Homo sapiens
acaaaaaaaccttacataaattaagaatgaatacatttacaggcgtaaatgcaaaccgcttccaactcaaagcaagtaacagcccacggtgttctggccaaagacatcagctaagaaaggaaactgggtcctacggcttggactttccaaccctgacagacccgcaagacaaaacaactggttcttgccagcctctagagaaatcccagaacactcagccctgacacgttaataccaaggggaacagttaacttcaatacaaggtcaaaatcagcaaca

SEQ ID NO: 1804 - DNA, 200 bp, Homo sapiens
  misc_feature 12: n = A,T,C or G
acaatttaattntgcttccagtctcaagcacttaagaacaatttttggaatctttcaggttaactaaaaaggttatatcaacaagcaaaactcccaaaagattaggtaagaaaaaattagttaactgctttaaaaatatccaactcactttcttcattgattaggagtaactgggaaatatctctgtcctgataacttgg

SEQ ID NO: 1805 - DNA, 310 bp, Homo sapiens
  misc_feature 40, 41: n = A,T,C or G
acatcacctgctgaggaaggataaatcttcctgctttaanngagccctgtcatctctcctcttaatgcacgtttcccttggtattagtggaagctgtgttcaagatgggaagcccttcctgcagttcttagaaacacctgctttctaaggagagccttttctaggattagcttatgtgtgttttctctaggcgattttttatttcagttaccaatttaattttcaagttgacagatgctgtgtaaagtctctcataatgagagtagtccattaaattgttgaaagttgcactgcttttcatctttcaggt

SEQ ID NO: 1806 - DNA, 293 bp, Homo sapiens
  misc_feature 14, 140: n = A,T,C or G
actcatttcaatgngttgccgtgccactaagcagttccatcttccactggattcatcatagtcacaaatatccatgaccgaatagttctgaatcctcctgagccactgcaaagaaattctttcttgtgttgcccatgtcncatcacacaagtagtgatcccctatcaacatagaggcaggagcagtgatttgtatggaagttgcattggtgactgagctgagagagtctgtatttacaacaaaggaactttacagttggattcacagctcctgcctttggatatggaacccgt

SEQ ID NO: 1807 - DNA, 481 bp, Homo sapiens
  misc_feature 389, 396: n = A,T,C or G
cgctctcagctctcggcgcacggcccagcttccttcaaaatgtctactgttcacgaaatcctgtgcaagctcagcttggagggtgatcactctacacccccaagtgcatatgggtctgtcaaagcctatactaactttgatgctgagcgggatgctttgaacattgaaacagccatcaagaccaaaggtgtggatgaggtcaccattgtcaacattttgaccaaccgcagcaatgcacagagacaggatattgccttcgcctaccagagaaggaccaaaaaggaacttgcatcagcactgaagtcagccttatctggccacctggagacggtgattttgggcctattgaagacacctgctcagtatgacgcttctgagctaaaagcttncatgaangggctgggaaccgacgaggactctctcattgagatcatctgctccagaaccaaccaggagctgcaggaaattaacagagtctaca

SEQ ID NO: 1808 - DNA, 289 bp, Homo sapiens
  misc_feature 128, 129, 214, 220: n = A,T,C or G
ttggttctctcttctaagtttctgcccctctgcttccttactttttttcctttttgaattctatctttatctgtcttttgttcactttttaatgctatatatgggcaggggtgagagacattactgannaccttggtgagcaagcctggctttaaagattggagaagagcttctggcaccagaaccctgtcttcctccagttctcaacacggtngttgcntcttcagtcataccggaatctgaatcaaaaaagtattttaaatatccatgatttctccctgtattgagg

SEQ ID NO: 1809 - DNA, 345 bp, Homo sapiens
acactgatctgagatcgcaccactgcactccggcctgggcgacaaagtgagactgtctaaaaaataataataataaaaagcattttgaaattagtcgtggtcaatgtaattctactctttggaatccgtttagctaaatgaatgtagtgctcttgttgaatggaaacaggtgataggaaatgcctaccatttgactcaatatggataatcaagagttgctcaggatgcttggatctgggggtagattctcattcatcattgccctggcacatgtcaattactacataaaaggtcaaatgcaatgtcaaatccaaagcctcaggaggaaagtgagttcagttccca

SEQ ID NO: 1810 - DNA, 212 bp, Homo sapiens
actcccgattgaagccccattcgtataataattacatcacaagacgtcttgcactcatgagctgtccccacattaggcttaaaaacagatgcaattcccggacgtctaaaccaaaccactttcaccgctacacgaccgggggtatactacggtcaatgctctgaaatctgtggagcaaaccacagtttcatgcccatcgtcctagaattaat

SEQ ID NO: 1811 - DNA, 494 bp, Homo sapiens
aggacacagcatggacatgagggtccccgctcagctcctggggctcctgctactctggctccgaggtgccagatgtgacatccagatgacccagtcgccatcctccctgtctgcatctgttggagacggagtcaacatcacttgccgggcaagacagagcatttacacctatgtgaattggtatcagcagaaaccagggaaagcccctaacctcctgatctatgctgcatccattttgcgcagtggggtcccatcaaggttcagtggcagtggatctgggacagatttcactctcaccatcagtagtctgcaacctgaagattttgcaacttactactgtcaagagagtcacagttcgcctccgtggacgttcggccaagggaccaaggtggagatcaaacgaactgtggctgcaccatctgtcttcatcttcccgccatctgatgagcagttgaaatctggaactgcctctgttgtgtgcctgctgaataact

SEQ ID NO: 1812 - DNA, 386 bp, Homo sapiens
actcattttttatttttaataattgctacttgaatatacagcatgtttttaaaagtaataaggtttataggaagcagggtccacagccgtagctctttcaaatattagataaataatagctctttcagttcaattatttatgaacgatagtttttctgacctaagatgctcatctacagtattcatatagattctcatattcttttaagaatctttcacacagtgtaactgtcatgcattagatatatgaaagattctgtgttgaagggtaattcaagttcatatactgtttcctggaatggtgtcacaaaatggatctcacttggcatataaactgccaagtccttatacatataaaagaaatggcaaactgccagatattgagt

SEQ ID NO: 1813 - DNA, 278 bp, Homo sapiens
acagaagagagaaattcaaacaaaatattgctgttcttcagttttgtttgtggaatttgaaattactcaaatttaaaataaattactggactgtggaaataacatagaattgaagttttaattaaataccactcaaacgaaaagaacagtagtttttgtagttttatattggatactgaggcattagggaggcatgaaaggaagaggaatgaggattgagacatgtgaagacattgtgcattatatcaatgtgcattcctgtagttcattaacaaggt

SEQ ID NO: 1814 - DNA, 385 bp, Homo sapiens
  misc_feature 14, 251, 255, 256, 300, 320: n = A,T,C or G
acagcccaatacangatcatccaaaaacacgttgacacttccaagacactggcacggggtccacggagttttgcgcgtaaaattttaaaaacccttcctacggtgatgtttaaggccaggagcattcatttctcaaccttgtatcaatccaggatccatcggactaggtttcattaggcaagagagtagttcgttcctcctctgtgctgaggatgttttgagatttaggacctttttctccttgaatactncagnngataaaacaaggcccatggctaatccacttatcagagcccatangaccttgtatagctgctgcnccattcaaaaccaattttctcatacaggaaatccacccagcgttggtcccataaaagcaccaatt

SEQ ID NO: 1815 - DNA, 643 bp, Homo sapiens
  misc_feature 584: n = A,T,C or G
acagggaacagatgaaccgcctctggaggaacacgtgcagtcaacaaatgaaagtctacagctggtaaaccatgaagcaaattctgtggcagtggatgttattcctcatgttgacaacccaacctttgaagaagacgaaactcctaatcaagagactgctgttcgagaaattaaatcttaaaatctgtgtaaatagaaaacttgaaccattagtaataacagaactgccaatcagggcctagtttctattaataaattggataaatttaataaaataagagtgatactgaaagtgctcagatgactaatattatgctatagttaaatggcttaaaatatttaacctgttaacttttttccacaaactcattataatatttttcataggcaagtttcctctcagtagtgataacaacatttttagacattcaaaactgtcttcaagaagtcacgtttttcatttataacaattttcttataaaaacatgttgcttttaaaatgtggagtagctgtaatcactttattttatgatagtatcttaatgaaaaatactacttctttagcttggggctacatgtgtcanggtttttctccaggtgcttatattgatctggaattgtaatgtaaaaagcaatgcaaact

SEQ ID NO: 1816 - DNA, 518 bp, Homo sapiens
  misc_feature 473, 489: n = A,T,C or G
acccaaaactgaaagaagtggatgatgtgcttggtggagcagctgcctgggagaatgttgactctactgcagagtcgtgtcccaaatgcgaacatcctcgtgcttacttcatgcagcttcagacccgctctgcagatgagccgatgaccaccttctacaagtgctgcaatgctcagtgtggacaccgctggagggattagggccaggatggcccagctgccctagtgtgtgcttgccttgtccctcggggtagatgcttagctggcagtatgagttgtgtgtcctgagggtctttgctagtgtggtggaaagataaaccttttgaggtgaagagccagggggtcaggaaatatggcctatctgccaggcagggtggatgaagtcatgaatgtctgggagtttttctgtgtggggaggagacagagacccataaactaaatatgctctgtgtaaagtcctattcttttatgttncactttattggcagtngacattcccttactcccaatcaacactct

SEQ ID NO: 1817 - DNA, 382 bp, Homo sapiens
  misc_feature 320: n = A,T,C or G
accatgctgttttggttactgtagccttgtagtatagtatataaaattatttaaagcagtttaccattaaaaacatatatacaataaggctaatcaaaacgtttaaaagtgagaattagatgaaaaaaatctaggttagtttttttatacttaagcatagccgcagagcttcttaacagtcaaggcagaaataaaaatgtgtaattctactgcctgattcatatcacaagagaaagaatttttgaggtgataaattcagagatatttatctcatgtttctttaccctaagaatatagatctacataatgagtcatatcgntcaatgatatttttggagtatgcagaacattattaatgataattgcttatgtttatgtatgc

SEQ ID NO: 1818 - DNA, 144 bp, Homo sapiens
  misc_feature 16: n = A,T,C or G
caagaaaccagactgngatgactgggagagcgggctgaatgcaatggagtgtgcattacatttggaaaaaaatgtgaatcagtcactactggaactgcacaaactggccactgacaaaaatgacccccatttgtgtgacttcat

SEQ ID NO: 1819 - DNA, 162 bp, Homo sapiens
  misc_feature 154: n = A,T,C or G
aaattgcctgtggattattggcctctactaacttgcactgtcgtaaaaacaatttaagattcccccaattcatgtaaggcaatatcaccatgggcttttctccttcttctatacacacatgagtaataggaagaagatttctgtgatgaagacnctcgcagc

SEQ ID NO: 1820 - DNA, 201 bp, Homo sapiens
tagaggagctgatgaagctttctcccgaggaattactgctgcgatgggtgaactaccatctgaccaatgcaggatggcataccatcagcaacttcagccaagacattaaggactcgagagcctattttcatctgcttaatcagattgcccctaaaggtggggaagatggacctgccattgccattgacctttcaggaatta

SEQ ID NO: 1821 - DNA, 277 bp, Homo sapiens
acctctcaacattaccaaaatcatttctttagagggaaggaataatcattcaaatgaactttaaaaaagcaaatttcatgcactgattaaaataggattattttaaatacaaaaggcattttatatgaattataaactgaagagcttaaagatagttacaaaatacaaaagttcaacctcttacaataagctaaacgcaatgtcatttttaaaaagaaggacttagggtgtcagttttcacatatgacaatgttgcatttatgatgcagtttcaagt

SEQ ID NO: 1822 - DNA, 443 bp, Homo sapiens
actctaatttcactaactgccaaaaggttttccagaataatctcagttgcttcattcctttaaagatgaagcccgaagaacgcatggcgattactttagaggaacaattagcagcagaggcagggctgtgctgatcccatctggcatcgctgggagctaacattaaagacatggcactttgggtccgggtccaggtcctggttcagagcagctgccacaccgtggctactagaggatccttttccggctttggaaactgaggctgactgcaccatttacagaaatttcatcatgaagatccttacacttaacaccttaaggtgatgagttttcacatgactgttttcaaggccacagccaccacctttaatcatcatcactaaaggcctgagactgctcgccgtgctcaacaccgactggagtggccatgtcttccagccacg

SEQ ID NO: 1823 - DNA, 506 bp, Homo sapiens
acacagatgggaagccctaagtcatcaccagggcaactgtgggaggatccaatgccccacagaggaaagaaacagtaacctcatgtgaggaagagaagttcgtccccccgccaccctagttcctaaaaaacacctagcactttccttccggttccctcagcttttaaccaactaattatcaaacggaagaaaacataaagcgcaagacacaggagggagagagggggagaatgaaaacacaggtatttttgtgccaacatcctgcacacacaaacctggagttctccagaaattacgacaggttgggtgtggggtattagggaaggaaatagaagagttcccgaggcctgaaaaaagaggtaaacacatcacagaactagatgagagtttcattagactctaactaaaaacagagaggtgtgattactatttccagccagtttcccccatcacgataagtcatgtaacaaaccaaggcaatgtcggtcttgagccagactcacaga

SEQ ID NO: 1824 - DNA, 234 bp, Homo sapiens
gtcatgacgccagtcagatcacactagccttgggcacagctgccatgctgtccaaaggagccctgaaccctgctgacatcaccgtcctgttcaagatgttcacaagcatggaccctcctccggttgaacttatccgcgttccagccttcctggacctgttcatgcagtcactctttaaaccaggggctcggatcaaccaggaccacaagcacaaatacatccacatcttggcgt

SEQ ID NO: 1825 - DNA, 321 bp, Homo sapiens
acacaaagctacccaggagggttgctgaagcacatgtgcctaatttcatttttgatgagttcagaacagtgctgtaactgtttttcctacttcttcaatggaaggattgtccttagatcttcccaccatcacaaatgaatttgaagatgaaaagaaactcagttgctcatacaactgcattttttctgtctattatgggaaacatcagacgttctgagtaagatatatctcatggcattagttaatataactgatattgtttaaatcatggtattacatgcaatttatatcagataaaagcagaacacatttttgtacctg

SEQ ID NO: 1826 - DNA, 395 bp, Homo sapiens
  misc_feature 304, 319: n = A,T,C or G
actctcaaccatgatagataatgccttaacatggattttaacgtttgcaggatttgctaaattcataagatagttattacctttctttgaaatttgtaatgttttatattcttgtttcatagccatttgtcagtccacagtggtcattatggttttactttttgatagttcttacaccttgttggagaaactacaaaagaaagttgtcctcgtccttccccttagctaacatcaaaattaaaaagttgaatattaatattagctaacattaaaatggaaggtaatttcaggttttagtgttagnctaacattaacagtnctaataatttagctttgtaaattccaaggctaaaaccctttcatgggcttcacagtatttagtcctaattaaatac

SEQ ID NO: 1827 - DNA, 471 bp, Homo sapiens
tttttttttaaaaattaagactggggtgatttattaatcttgttaagaactctgatacaaagcacagtaaaaggccacaaaccagtaaataaacaacgtggcttttggctattttacaactgctgctacagcactatcagcaaaacactctatcactttgaacgaaggcatccaaatggcaaataaaagctttactcacttatctgattaaaatgtttaataaagctttaagtatttgctggtttaaatattaccaatctaaaaaatatatttaaaaaaaatttcagttaacacgagatttatagagaaagttactaggtcttgaaggcaaggcagttggttcctatgccatagaattttttttgaatttatgaattagtaaagtagcagattgtattataggcctcaagtcacttaaatttatataggttattagcagtatctttaaatatacaatataaacaaaactgt

SEQ ID NO: 1828 - DNA, 422 bp, Homo sapiens
  misc_feature 12, 13: n = A,T,C or G
accattctgganngctgtccactgtatagaacatttatgaatagaaggtaaggacactctgatgattcccacgaactaggaggattggtggtaggtccttagatagagcttctaaccatgccatgtagagagcactagacacagcaccttttcgtgcaactgggagactcatgacaataatattagctgtgcttgaatgttcctttaataactcatttaacctgatctgccggtatgtcttggtcttataaagttcaagctcattatctgttattcgccatggttcatcttctttcattttatctgcaatatcttgctctttatcatcttcaggaaatcattgagccatacagacttcatgatttcctcaaaagctataatattttctttctttggtttggtattgatatctcctagaacca

SEQ ID NO: 1829 - DNA, 317 bp, Homo sapiens
actcgcttttgtgggacttcttttttcactgttggtgatgacaaaactgtgaagcagtggaaaatggatgggccaggctatggagacgaggaagagccattacatacaatattaggaaagacagtgtatactgggattgatcatcactggaaagaagctgtttttgccacatgtggacagcaagtagacatttgggatgaacaaagaactaatcctatatgttcaatgacctggggatttgacagtataagtagtgttaaatttaacccaattgagacatttctcttgggaagttgtgcatctgacaggaatatagt

SEQ ID NO: 1830 - DNA, 77 bp, Homo sapiens
  misc_feature 8: n = A,T,C or G
acctgcancaacccagggcagtctccacagctcttgatctatttgggttctaatcgggccgtccggggtccctgaca

SEQ ID NO: 1831 - DNA, 446 bp, Homo sapiens
acttgagaccagaaactgcacaggggattttcttgaatttcaaacgacttttggagttcaaccaaggaaagttgccttttgctgctgcccagattggaaattcttttagaaatgagatctcccctcgatctggactgatcagagtcagagaattcacaatggcagaaattgagcactttgtagatcccagtgagaaagaccaccccaagttccagaatgtggcagaccttcacctttatttgtattcagcaaaagcccaggtcagcggacagtccgctcggaaaatgcgcctgggagatgctgttgaacagggtgtgattaataacacagtattaggctatttcattggccgcatctacctctacctcacgaaggttggaatatctccagataaactccgcttccgggcagcacatggagaatgaggatggcccattatgcctgtg

SEQ ID NO: 1832 - DNA, 266 bp, Homo sapiens
actatctgtgaagttacacttttttttttttttaaaggtagagatgtgtgtgtgtgtaggtattaaagatgtgttgttggtttccaaaaaggaacactggaaaataaattttgaatgtttatgttctcagaatcaggttgacagtcccttgctgacatggctttgctttgtgtaaatacagtggatctcaatcttcggggtgtgatgaatagcgaatcatctcaaatccttgagcactcagtctagtgaagatgttgtcattatgt

SEQ ID NO: 1833 - DNA, 275 bp, Homo sapiens
  misc_feature 15: n = A,T,C or G
acaaaagaaccacanatgcgtctctgtaggactgaaaaggtcaggacaaataatgattcttgttctaaatgcagatcctagttattttggaatgaaatgctgttttctagaaagcaacatgaaagtagcagtaagaaagatgactaccatcatttcaaaacaggataagcctaaatataatttaccatttatatgtcaacaaattaaggaaaactgtataaagttcctagtggtttcatataggccaaggagactgtatctgtcccacccacagt

SEQ ID NO: 1834 - DNA, 202 bp, Homo sapiens
acagtatgatgcgcaaggaatggcctttagcaaaagcgaaggtaaaagaaagactgcaaaagcagaagcaattgtttataaacatggaagtggaagaataaaagtaaatggaattgattaccagctttacttcccgatcacacaggacagagaacagctgatgttccctttccactttgttgaccggctgggaaagcacgac

SEQ ID NO: 1835 - DNA, 176 bp, Homo sapiens
acttctacctctcacttctaattaaacatggaagaaaacagactggctaatttggtcacactttgtccaaatacagtgttgacttaatggagcccttaaatatccaaaataataagtgaatgctatttataagacaataaaaagttttaaaatcttccaaatgtgctgttaacagt

SEQ ID NO: 1836 - DNA, 330 bp, Homo sapiens
acctcgcaaaccaagccaagaaccagtcagatgaggcaaaagaggctaaggggagtgggtatgagaaattagggcccagtcgagacccagatccactgaacatctgtgtctttattttgctgcttgtatttattgtagtcaaatgctttacatcagaatgatgaaaataggcttgccactttctcttattttaattccatggtagtcaatgaactggctgccactttaatataactgaaaattcattttgagaccaagcaggatcaagtttgtagaataaacactggtttcctagctatcctctgaaaacagtatgaaacatgaccaagt

SEQ ID NO: 1837 - DNA, 170 bp, Homo sapiens
  misc_feature 11: n = A,T,C or G
acaaaaccaantgcaaatatcaaactattacacaacaaaggaactcaacattaaggggacactgcctaatgataacaaaaacttaagttataattagagtttcagagatagatttagattggggtttctgtatttttcttacatcagctggaaacttatgcaccaattat

SEQ ID NO: 1838 - DNA, 444 bp, Homo sapiens
accgcattacattatgcctgtgaaatgaaaaaccagtctcttatccctctgctcttggaagcccgtgcagaccccacaataaagaataagcatggtgagagctcactggatattgcacggagattaaaattttcccagattgaattaatgctaaggaaagcattgtaatccttgtgaccacaccgatggagatacagaaaaagttaacgactggattctatcttcattttagacttttggtctgtgggccatttaacctggatgccaccattttatggggataatgatgcttaccatggttaatgttttggaagagctttttatttatagcattgtttactcagtcaagttcaccatggccgtaatccttctaagggaaacactaaagttgttgtagtctccacttcagtcagaaactgatgtttcagctaggcacagtggtac

SEQ ID NO: 1839 - DNA, 310 bp, Homo sapiens
acaagctttttggagaaaagaaaaagaacagcagctattacatgataaacagatggaagaagaaaagcagcaaacagaaagggttacaaaagagatgaatgaatttatccataaagagcaaaatagtttatcactactagaagcaagagaagcagacggtgatgtggttaatgaaaagaagagaactccaaatgaaaccacatcagttttagaaccaaaaaaagagcataaagaaaaagaaaaacaaggaaggagtaggtcgggaagttctagtagtggtagttccagtagcaatagcagaactagtagt

SEQ ID NO: 1840 - DNA, 381 bp, Homo sapiens
acgacgaaattgaggccgaggtgaatctatgttttgactaatttgtttacaagctagcagaccagatatttgcctattataaggttatggcaggaagtttgcttcttgataaacggttacgatcagaatgcaagaatcagggagccacgatccacctcccgccgtctaaccgctacgagacgctgctgaagcagaggcatgtgcagctcctcggcagatcaatagacctcaatcgtctgatcacccagcgcgtctcagcagccatgtataagtccctagaactggcgattggacgatttgaaagtgaagatttgacctccatagttgagctggatggcctgttggaaatcaaccgcatgacccacaagctgctgagccggt

SEQ ID NO: 1841 - DNA, 138 bp, Homo sapiens
  misc_feature 24, 25: n = A,T,C or G
acatgacaaggtgcggctccctanncccctcccctcttcaaggggtctacatggcaactgtgaggaggggagattcagtgtggtgggggactgagtgtggcagggactccccagcagtgagggtctctctcttcctct

SEQ ID NO: 1842 - DNA, 142 bp, Homo sapiens
  misc_feature 64, 65, 80, 110: n = A,T,C or G
acaggcactttctgagaaacctttgtcctcacttgaggcattttgttgtcgggtttttgagttnntttttgtgggtattngcctcattccacccctgagctttcaggtanacagacgtgattcaaaactctgttctaaggtg

SEQ ID NO: 1843 - DNA, 338 bp, Homo sapiens
  misc_feature 8, 9, 23, 24: n = A,T,C or G
accctttnngctcttggccctcnngtcctgtcctggaccattggcaatataacagagacagctttctgcttctcaagaaaggattttttttacatcatcagaaaacatcaagtgaatcaagaaagaatagagctctgaggaccactgaagattcatgaggatctttgtgaatgctctgcagatgaaaaaggtattggggatcactttgaaatatggagttagggagggagactatgaagaaaaaagaaaaaaacttggagagaaggaacaccttgaagatgaagacattgcatctagaatgaagggtgaaaaaaaagctgatacatttcaatcaatgt

SEQ ID NO: 1844 - DNA, 398 bp, Homo sapiens
acactgttaagaagttgagcttttatcttagaggcagcagaaggtttggagccaaggaatgaaatgatgaggcgtccttcaggtaatgaacttcagctgcagtgtgaaaggggcaggaagactggcagctgtcaaaactggaacagtccagtgagtatgtgcaggcccgggcttgggcagtgacgagggcagggagcacacatcaatttctgcggtagaaccttctagaggaagaccagacagagggtcaacagagttgaaaggagaaaataattgaggatgaggtccaagtttttagtttcagagactaggcatatggttaatatttaggtagaaaattcaggaaaaggagcttgtggggcaggaagggaaggaacggcagcttggggcactctgaa

SEQ ID NO: 1845 - DNA, 135 bp, Homo sapiens
  misc_feature 46, 52, 53: n = A,T,C or G
cttcaccctaggcctggacccaggcccagtttccaaagcaagcagnacacanngcatgttcacataagcatgggggctggggggacactggggcttactgatctttttctaggggcctccagcccctggcaccac

SEQ ID NO: 1846 - DNA, 560 bp, Homo sapiens
actggtccaggagttatccaggatagattttcacccaccatgggacgtcatcgttcaaatcaactcttcaatggccatgggggacacatcatgcctcccacacaatcgcagtttggagagatgggaggcaagtttatgaaaagccagattagcctgaggcctgctcagtcgttcctaatgaataaaaatcaagtgccaaagcttcagccccagataactatgattcctcctagtgcacaaccaccacgcactcaaacaccacctctgggacagacacctcagcttggtctcaaaactaatccaccacttatccaggaaaagcctgccaagaccagcaaaaagccaccaccgtcaaaggaagaactccttaaactaactgaaactgttgtgactgaatatctaaatagtggaaatgcaaatgaggctgtcaatggtgtaagagaaatgagggctcctaaacactttcttcctgagatgttaagcaaagtaatcatcctgtcactagatagaagcgatgaagataaagaaaaagcaagttctttgatcagtttactcaaaca

SEQ ID NO: 1847 - DNA, 485 bp, Homo sapiens
aaaagattgatcgccgttctggtaaaaagctggaagatggccctaaattcttgaagtctggtgatgctgccattgttgatatggttcctggcaagcccatgtgtgttgagagcttctcagactatccacctttgggtcgctttgctgttcgtgatatgagacagacagttgcggtgggtgtcatcaaagcagtggacaagaaggctgctggagctggcaaggtcaccaagtctgcccagaaagctcagaaggctaaatgaatattatccctaatacctgccaccccactcttaatcagtggtggaagaacggtctcagaactgtttgtttcaattggccatttaagtttagtagtaaaagactggttaatgataacaatgcatcgtaaaaccttcagaaggaaaggagaatgttttgtggaccactttggttttcttttttgcgtgtggcagttttaagttattagtttttaaaatcagtacctg

SEQ ID NO: 1848 - DNA, 420 bp, Homo sapiens
actggcacgctctatagccaaggaaggcttcgagaagattagcaaaggtgctaatccagtggaaatcaggagaggtgtgatgttagctgttgatgctgtaattgctgaacttaaaaagcagtctaaacctgtgaccacccctgaagaaattgcacaggttgctacgatttctgcaaacggagacaaagaaattggcaatatcatctctgatgcaatgaaaaaagttggaagaaagggtgtcatcacagtaaaggatggaaaaacactgaatgatgaattagaaattattgaaggcatgaagtttgatcgaggctatatttctccatactttattaatacatcaaaaggtcagaaatgtgaattccaggatgcctatgttctgttgagtgaaaagaaaatttctagtatccagtccattgt

SEQ ID NO: 1849 - DNA, 200 bp, Homo sapiens
actattgacccagcgatgggggcttcgacatgggctttagggagtcataagtggagtccgtaaagaggtatctttactataaaagctattgtgtaagctagtcatattaagttgttggctcaggagtttgatagttcttgggcagtgagagtgagtagtagaatgtttagtgagcctagggtgttgtgagtgtaaattag

SEQ ID NO: 1850 - DNA, 562 bp, Homo sapiens
  misc_feature 125, 126, 300, 326, 334, 340, 355, 363, 368, 384, 390, 399,401, 413, 421, 485: n = A,T,C or G
acttcagtaagagatgggggcaaaagagttggtagtggtgcacaaaaaacaagaacaggaagactcaaaaagccttttgtaaaggtggaagatatgagccaactttataggccattttatcttcnnctgaccaatatgccttttataaattattctattcagaagccctgcagtccatttgatgtagacaagccatctagtatgcaaaagcaaactcaggttaaactaagaatccaaacagatggcgataagtatggtggaacctcaattcaactccagttgaaagagaagaagaaaaanggatattgtgaatgttgcttgcccanatatgaanatctanaaactcaccttctangtgagcancacanaaactttgcacagagnaaccantatcaagtngntgatgatattgnatctaagntagtttttgactttgtggaatatgaaaaggacacacctaaaaagaaaagaataaaatacagtgntggatccctttctcctgtttctgcaagtgtcctgaaaaagactgaacaaaaaggaaaaagtggaattgcaacatatt

SEQ ID NO: 1851 - DNA, 207 bp, Homo sapiens
gaaagttcccttccctgcccacacacaacgaaaacatggtggccaaagtggatgaggtgaagtccacaatcaagttccaaatgaagaaggtgttatgtctggctgtagctgttggtcacgtgaagatgacagacgatgagcttgtgtataacattcacctggctgtcaacttcttggtgtcattgctcaagaaaaactggcagaatg

SEQ ID NO: 1852 - DNA, 260 bp, Homo sapiens
actttttggtgggagtggggtgggacatggaaggggtagggtcagatggagacagcccagaaggaaagccagctctatccacccctacagcttccccggccaaccaggttcaaagcccatcagttatatctcactgtgccgctgtcaatgcatgttgtggctgctggtaaagagttggtttggcctccacagagagaggatgggaaactagggtagaagctacaagggctaagaacttgatgctttttctccagtacctg

SEQ ID NO: 1853 - DNA, 176 bp, Homo sapiens
  misc_feature 14, 15, 16: n = A,T,C or G
actccttacactannncctcatcacccaactaaaaatattaaacacaaactaccacctacctccctcaccaaagcccataaaaataaaaaattataacaaaccctgagaaccaaaatgaacgaaaatctgttcgcttcattcattgcccccacaatcctaggcctacccgccgcag

SEQ ID NO: 1854 - DNA, 371 bp, Homo sapiens
  misc_feature 359: n = A,T,C or G
ccagaaccagggtgacatcaagctctgtgagggtttcaatgaggtgctgaaacagtgccgacttgcaaacggattggcctaatgaagaagttcaacctggagagatggaaaatcagctctcataactaagttaatttagtataaaaatagaattgatagtgagggtataaagtgtaaccatcagttaaacctctcctgtcattcctggcttccttgcttcagaattgaaatggaagtgggggtgtccctactctgtagaatctgggactgggcaaatgtttgtgtggcctccttaaactagctgttatgttatgattttattctttgtgagttaattagaataaagtcattttcttccnaaaaaaaaaaaa

SEQ ID NO: 1855 - DNA, 302 bp, Homo sapiens
  misc_feature 15, 16, 153, 251: n = A,T,C or G
ttttcatttcaggannggacgcttctcttgtgagccagctggaggtcttacctctttgactgaaccacccaagggacctggatttggtgtgtcagggccagggaggcatggccccacttgtatccagaagttcccaggggtgattgtgatggnggttgggactggaggttgtataaggtgttcttggaaggaaggggcaggagttggaattagttggtccctactgtcccccatgaggttgtgaacccctncccccaacttttcatgtttcttaaaggccattttggttttttaaaatctgt

SEQ ID NO: 1856 - DNA, 234 bp, Homo sapiens
acagagagggcaggaagtttccatccagtctggtttaggtgctcttcttttcttcacccagtaaattcacggtagctttcttcgcttctttagtgatggcatctgcagtctctttggccttgtctttaaggtccttgaccacactgtccatctgggactcgtgcttcaggaagaaaggacggatgatgcgcttgtagagcagttcagccccattagaagggctcggggccatgc

SEQ ID NO: 1857 - DNA, 570 bp, Homo sapiens
ccaaattccagtgtgcagaccacaacctcaaaacaaaaaaggttggtcatgcagcattaaactttgacaaggccactgacatcgtgacaggtctgaaacagaaaacctcctttgggagaccaatgtgggacaatgagttttctacaatagctacctcccaccccaagtctgtagtgggagttttcttatgtggccctcggactttggcaaagagcctgcgcaaatgctgtcaccgatattccagtctggatcctagaaaggttcaattctacttcaacaaagaaaatttttgagttataggaataaggacggtaatctgcattttgtctctttgtatcttcagtaatttacttggtctcgtcaggtttgagcagtcactttaggataagaatgtgcctctcaagccttgactccctggtattctttttttgattgcattcaacttcgttacttgagcttcagcaacttaagaacttctgaagttcttaaagttctgaagttcttaaagcccatggatcctttctcagaaaaataactgtaaatctttctggacagccatgactgtagcaa

SEQ ID NO: 1858 - DNA, 266 bp, Homo sapiens
actggaaaaacgaccttcgtgaaacgtcatttgactggtgaatttgagaagaagtatgcagccaccttgggtgttgaggttcatcccctagtgttccacaccaacagaggacctattaagttcaatgtatgggacacagccggccaggagaaattcggtggactgagagatggctattatatccaagcccagtgtgccatcataatgtttgatgtaacatcgagagttacttacaagaatgtgcctaactggcatagagatctggt

SEQ ID NO: 1859 - DNA, 495 bp, Homo sapiens
  misc_feature 15, 481, 491: n = A,T,C or G
acatacgtctgccangggtaacctggccactgtccctgtccttctacagaacctgagggcaaagatggtggctgtgtctctccccggtaatgtcactgtttttattccttccatctagcagctggcctaatcactctgagtcacaggtgtgggatggagagtggggagaggcacttaatctgtaacccccaaggaggaaataactaagagattcttctaggggtagctggtggttgtgccttttgttggctgttccctttgccttaaacctgaagatgtctcctcaagcctgtgggcagcatgcccagattcccagaccttaagacactgtgagagttgtctctgttggtccactgtgtttagttgcaaggatttttccatgtgtggtggtgttttttgttactgttttaaagggtgcccatttgtgatcagcattgtgacttggagataataaaatttagactataaaaaaaaacctcgntccccactanggta

SEQ ID NO: 1860 - DNA, 489 bp, Homo sapiens
  misc_feature 469: n = A,T,C or G
acagattgggcggaatgtggagaaggttggccacagtccagagccaggagcccatggaacaacttggaaggtgactcaggtgaggctgtcaatgagggaatcccgcatgctggtggcaatggtgctaggctgggcttcattcagcttgaagacactctccaccactgacagctctgtgctggttgtgtccaggccacagaaggcacaccagtcattcaccaccatcccagcagcaatcacctcactgcctcggttcacagtccccgccacaagggggacttgaagaagagaggacagctcatcctggtcttcaattgaagtcttgggatgcaccagccctccctgattgctgaagacacagtagcttcctactagcacctggtcggccactgtctgtctgaagacttccaccttgagcacatctgccagaatttcttctgtctccctgtccaagtctgggtggaccaangccacgtagtcattgcaggt

SEQ ID NO: 1861 - DNA, 443 bp, Homo sapiens
accaccttaattcctcagaatgcaattgtgtatgataccaagctacaacttgataagaaattgtgattttcttcttttattttcattctccaattttaaaaacatctattgcacatctaccatgtaggaggaatgtgctcacactggagaacagaaaaaagttttcaatcttcattacctgcccatgaggggcttagtctagctgggaaggaaagaaagaaccaatcaaaaggagtttagtgccacaggagcacagcaaggagagaccaaactgcccaggattcaaggaggatcatccagagatctgtcagggggtttcctctgggtccccttcgtttgtctagaaggccacacaaataaagaaattagatttttaaatacaacacagatcgaccttaggtgtgcccaaaacactactgtatataaacaagaactggtacctc

SEQ ID NO: 1862 - DNA, 106 bp, Homo sapiens
acaaggaggggaaggaagctgaacaggggtggctcgtgagctaaggaccaaaggtcgacctgtctggatgtttggagcaggactactggagagggcattaggcggt

SEQ ID NO: 1863 - DNA, 454 bp, Homo sapiens
acaaaagggaagggcgattcacactttacaaggtgagaggggctctgattgtaaggaaagctcgggcaaggctagacttttgcacgtccttttgactgtcacaaaatcaaaacattacttttttaggattgaaaaaacactagtgagaactcaatcttgaataacatttagaaagaatctcgctatacttgagactagatgacaaataaaaccaagctatttttttctttttaaacattaactaggctgtataaagaacatttattccttcaaaagaaaaaaatttacttctggttgaaattacaatttacaatatacaacactatatgctacgaccataaaaggtgagaatatacactgaatgcacagggctggctaattctcttttcttaccaaaaaacgtgtttatgttgattcaaacttctccacatttacattacaggtatacaaatgt

SEQ ID NO: 1864 - DNA, 454 bp, Homo sapiens
acccatgcaggactcactacattgtataataactatgatctatagtgataaaaatatagaagtatctttgattttaatcctaaaagcagggggaaaaagtcaccttatcttaatgttaacaaaatcaagagctacccctaatatatcgatcaaaccacttcttatggctttgcttatagttgctcatggtcctttcaaaatgatgtggtagctaccttcttttctgacaaaggattattttcaacagagcaattatttctgagcccaaaataaaccacattaaataagaagaaaatcttcagtgtagaaagaaaaaggctcattgccgtgaaatagcagcaggcatcgagctctgtgagcttttcacacatcctcaatcaacccagctcaaggcgttactgagttcatctagtaagagcactgagcggtctctagtgctggaggggaattactc

SEQ ID NO: 1865 - DNA, 389 bp, Homo sapiens
acacaatgtgtagctcatatgaaaacctcatgacaagtcattgagttctgtaaactgccatacaacttacatgtgtaatattaattgcacaaagtatatcaagacatattgaagaaacacaaaattaagtgctattttaacggttcatctttcagtatgtgaatacgtatacaaatttaactgcacagttttgttgaaaataagtttcaacaataagacttcagttgttaaaattaacccaaaatataactttaattaaattacatcactacaatattaatctcttatcttgtttacatttttggtgttttgggacttttgttaaaaaaaaatccaagttctagaattgcaaaaacttcattgttgccactgagagagcaacatatagt

SEQ ID NO: 1866 - DNA, 303 bp, Homo sapiens
acagagagaggaagaagctattcagttggatggattaaatgcatcacaaataagagaacttagagagaagtcggaaaagtttgccttccaagccgaagttaacagaatgatgaaacttatcatcaattcattgtataaaaataagagattttcctgagagaactgatttcaaatgcttctgatgctttagataagataaggctaatatcactgactgatgaaaatgctctttctggaaatgaggaactaacagtcaaaattaagtgtgataaggagaagaacctgctgcatgtcacagacacc

SEQ ID NO: 1867 - DNA, 477 bp, Homo sapiens
acttggcccgggtcacgcgtgggtcctctccgggctcgggagtagcatcctcaggagtagtgtagcgagcaaattctggaaagtagtcctcaatcttcgatttcccagcaaggactttctcagcgagcagatcttgcttgttgaggaacaggatcacagagatggtgcgcagccatctgttgttccagatgctcttgaagaggttcagagcctcctgcaggcggttggtctggttgtcctcccggatgaccatgttgcagctgctgctggccaccacgaagatgatggcagtcacatcgttgaagcactggatccacttgcggcgttcatcgcgctggccacccacgtcaaacatgtggaagttgactttgtccacctggaacttggtctcaaagattccagaagtcaggacacggcagcgaagcaggtcctgatcgctcggcacatagtcagcctgcttgatcacgtcgatcttgt

SEQ ID NO: 1868 - DNA, 484 bp, Homo sapiens
actcccagtagcaccaccacctgagccaagatcactgacagcagaagaagtgaaacgactagaagaacaagaagaagatacatttagagaactgaggattttcttaagaaatgttacacataggcttgctattgacaagcgattccgagtgtttactaagcctgttgaccctgatgaggttcctgattatgtcactgtaataaagcaaccaatggacctttcatctgtaatcagtaaaattgatctacacaagtatctgactgtgaaagactatttgagagatattgatctaatctgtagtaatgccttagaatacaatccagatagagatcctggagatcgtcttattaggcatagagcctgtgctttaagagatactgcctatgccataattaaagaagaacttgatgaagactttgagcagctctgtgaagaaattcaggaatctagaaagaaaagaggttgtagctcctccaaatatgcc

SEQ ID NO: 1869 - DNA, 461 bp, Homo sapiens
ggaatggaatcacccggaatggaatggaatagaatggaatggaatggaatggaatggaatcaacgcgagtgcaggggaatgtaatggaacggaatgcaatggaatggaatcatccgtaatggaatggaaaggaatggaatggaatggaatggaatggaatcgaatggaatggaatggaattaacccgaatagaatggaatggaatgggatggaacggaacggaacggaacggaacggaatggaatggaatggaatggaatggaacggaaaggaatggaatggaatggaatggaatggaatgcaatggaatggaatcaacgcgagtgcaggggaatggaatggaatggaatgcaatggaatggaatcttccggaatggaatggaatggagtggaatggaatggaatggaatcaacgcgagtgcaggggaatggaatggaatggaatgcaatggaatggaatc

SEQ ID NO: 1870 - DNA, 222 bp, Homo sapiens
acagctacagcttcatcaaccttagaacggagtgactctggagactcgagcatatgaagaagttctgaattatcaatctccaacaacatgccagtgattttaccagcaagagtagggtgcatggcttgaataagaggaaacagccgttcacccaacatttgcttttgctcttgaggaggggcagatgccaacatggaagcagtcaaaggttcctgaccttgt

SEQ ID NO: 1871 - DNA, 114 bp, Homo sapiens
tgcacaaccactacacgcagaagagcctctccctgtctccgggtaaatgagtgcgacggccggcaagcccccgctccccgggctctcgcggtcgcacgaggatgcttggcacgt

SEQ ID NO: 1872 - DNA, 450 bp, Homo sapiens
  misc_feature 366: n = A,T,C or G
accagccactacccctatgcagaggaagtgatgcagatgtgtgaccgctatgggattgtggtcatcgatgagtgtcccggcgtgggcctggcgctgccgcagctcttcaacaacgtttctctgcatcaccacatgcaggtgatggaagaagtggtgcgtagggacaagaaccaccccgcggtcgtgatgtggtctgtggccaacgagcctgcgtcccacctagaatctgctggctactacttgaagctccgtatgtggatgtgatctgtttgaacagctactactcttggtatcacgactacgggcacctggagttgattcagctgcagctggccacccagtttgagaactggtataagaagtatnagaagcccattattcagagcgagtatggagcagaaacgattgcagggtttcaccaggatccacctctgatgttcactgaagagt

SEQ ID NO: 1873 - DNA, 498 bp, Homo sapiens
ctgccaggcccagcagccaccacagcgcctgcttcctcggccctgaaatcatgcccctaggtctcctgtggctgggcctagccctgttgggggctctgcatgcccaggcccaggactccacctcagacctgatcccagccccacctctgagcaaggtccctctgcagcagaacttccaggacaaccaattccaggggaagtggtatgtggtaggcctggcagggaatgcaattctcagagaagacaaagacccgcaaaagatgtatgccaccatctatgagctgaaagaagacaagagctacaatgtcacctccgtcctgtttaggaaaaagaagtgtgactactggatcaggacttttgttccaggttgccagcccggcgagttcacgctgggcaacattaagagttaccctggattaacgagttacctcgtccgagtggtgagcaccaactacaaccagcatgctatggtgttcttcaagaaagtttctcaaaaca

SEQ ID NO: 1874 - DNA, 145 bp, Homo sapiens
accaggctcctttctgtgtattttactctcgtggttgcattagatcctcacgataagagaaggatactgttactgttctcattctacagaggaggaaactaagacacagagcttttctttgagatctgaaagagttaagatttgt

SEQ ID NO: 1875 - DNA, 217 bp, Homo sapiens
accccaccctctatgaagacagaatcactctctgccattcattctgcctgatgctaacaacacgcagctgatttagggagtgtcccagcctagctggatcaagggaaattccaggagccctggggcaggccctggcccccagtgccaagcctcagagtaagcagacattgggaaagttgccaaccacttggtagaccactaggttctctgttttccc

SEQ ID NO: 1876 - DNA, 191 bp, Homo sapiens
  misc_feature 16, 117, 118, 143: n = A,T,C or G
tgaatttgccccttcngccaggtggatgtttaccgtgtgttatataacttcctggctccttcactgaacatgcctagtccaacattttttcccagtgagtcacatcctgggatccanngtataaatccaatatcatgtcttgngcataattcttccaaaggatcttattttgtgaactatatcagtagtgt

SEQ ID NO: 1877 - DNA, 608 bp, Homo sapiens
  misc_feature 522, 526, 540, 541, 586, 593: n = A,T,C or G
accaggtattccataaaactctgtagaggtcatttacatttcgtaaattctgtaattacaccttactgtatcatgccctagtagtttcacaaacttagatattcacaaaaatgttttggaatatattccttgggaatgtgaagggtctcctatattacattaaacaaaaaaccatgcagttacttagagctcatagagctttctcaaaatcaactactgatcataacagcccaattaaaaactcaaacactttatattacagatatagagtttataatccagcaatgccaatataggtaatctgatagcccctatttgcaaagtgattaacaattatacaataacttctatctgctttggctcagatgtttaaatacttaaacagtttggaaagacttttttctgtgtgtatttcgttttgtttttttgtctgtgtgggcatgagcataggggaggttatactgaaaaggagaatgaagaggtcaggaattaaagagccactaaaatttgacttaacatttntccnataaaatacatgtnngagaatatggcttaaagacaaagagggggagagcctcttaattgntcatacnattttacttcaccct

SEQ ID NO: 1878 - DNA, 227 bp, Homo sapiens
actcattttatgtatgttacccttcagtaagttctccccattttagttttctaggactgaaaggattcttttctacattatacatgtgtgttgtcatatttggcttttgctatatactttaacttcattgttaaatttttgtattgtatagtttctttggtgtatcttaaaacctatttttgaaaaacaaacttggcttgataatcatttgggcagcttgggtaagt

SEQ ID NO: 1879 - DNA, 399 bp, Homo sapiens
acattctgcacttgacatcacagagcgaactgagattagcagtcctatgttctacaattacttaatgcttagataacatttgtgcaacttgtggtagagctagatttctgtctttctatatgcacatgaggtccatagcctatataataaaactggcaaataatgcatattacatgtaaaattacaaatgcataattgacaatgtaataagcaagtagacaaatgccatgatacagaagagaattattaaataaagcactgacattgtttgatacagtgaaaaaacactgcaattccacttttaaaatttgaagctatttacgtttatctactgatcaatatgatcagctgaatttaatggaaaaaaaatccaagaccagcagttcctcacatttgagt

SEQ ID NO: 1880 - DNA, 52 bp, Homo sapiens
  misc_feature 18, 19, 20: n = A,T,C or G
attaaacgaattgaaccnnnccaaccacaagacgataaagggaaacagggcg

SEQ ID NO: 1881 - DNA, 226 bp, Homo sapiens
acgagctgttcccaaccctgtaatcaacccctaccagccagcacctccttcaggttacttcatggcagctatcccacagactcagaaccgtgctgcatactatcctcctagccaaattgctcaactaagaccaagtcctcgctggactgctcagggtgccagacctcatccattccaaaatatgcccggtgctatccgcccagctgctcctagaccaccatttagt

SEQ ID NO: 1882 - DNA, 144 bp, Homo sapiens
  misc_feature 9, 10: n = A,T,C or G
acatgttgnngctgccgctccgggagtcatagcgcagccagatcccgaagttcttcacccgcaggggggacttctcaaacacctgcccacagtagacaatctcccctgaagacttcttcatcttctttaactgagatacaaagt

SEQ ID NO: 1883 - DNA, 170 bp, Homo sapiens
  misc_feature 155, 156: n = A,T,C or G
acacacatacaggcctaactgagaccgctcagaatttagaaatgtaactagtggcatacagaagagaaattgtgtctatgacaaagaaataaaaaattcttggtaattttaagcatagcaaactaggttctttaattaaaaagtttttttttgtnnttttttttggtttg

SEQ ID NO: 1884 - DNA, 353 bp, Homo sapiens
  misc_feature 290, 313, 330, 335: n = A,T,C or G
actgcgcaaacagagaaagtcagtgttatccaggactttgtgaaaatgtgcctggaagccaacatcccacttgagaaggctgatcacccagcagtccgtgctttcctatctcgccatgtgaagaatggaggctccatacctaagtcagaccagctacggagggcatatcttcctgatggatatgagaatgagaatcaactcctcaactcacaagattgttgactaggaggttaccaccattgtgatcaagataaatgtggagtattaaagttatgtgttgattgtgtggntcatttttgtatttatttcattnaaaatcatgtgacgcanaatanttttgcaatgtgtatata

SEQ ID NO: 1885 - DNA, 432 bp, Homo sapiens
acttgaatcttcttttttttttttttacttttgagacagggtcttgctcttgctatgttgcccaggttggagtgcagtggcactatctcagctcactgcagcctagacctccccaggctcaggtgatccccccacctcagcctcccaagtagctggaattacaggtatgtgtcaccacacccggctaatttttgcagtttttgtagagtttggcttgctgagaggtagtggagcggggcagagcggtagcctcaaggatagatgtggaagatagtatagcatagcctgcctttgctggtgtgtggcgattaggcctggtggaactgccatcaataaatcaagcgtgatcagggtgaggaataggaaagaaggaaatatggggaaatggggtgaatatcaggtggatcagagagatacagtcatgggggtcag

SEQ ID NO: 1886 - DNA, 446 bp, Homo sapiens
acacagcttaaccacggccaggagcaagaattcgagttaaacgaattgaaccagtccaaccacaagacgataaagggaaacagggcgtggggatttccagtttttccttttacattacaaagtttccaacacaagaagccaacaataccccagtgctgcaccaagttacttcccactgtttcccaaggcacagttaattaataatcagtagtccaagttctaagaacatttcctggaaaacaaggacgcacctcccgtggctctatgcatggcctgccactgatgaatcaaattcttaagaacctacgaccgtctgatacccttgaggagagcaccctcatagaatctccagcatcaggcctcagttttcccatctgtaaaagacagccatgcaaagtgggagatccgctaggcttccagatcgaagtcatcgcgctcctcattgt

SEQ ID NO: 1887 - DNA, 306 bp, Homo sapiens
  misc_feature 159, 209: n = A,T,C or G
taatgagacaaagcctcatggagtttaagggaccagtattatatatattttcaaggacaagattaatgcagggaaattctaggacagagaacagctaactcaaacttttcccctttgcttccctctcaaattgcttacatagagaactgtgccaatacnaaagaaataaaggatatgctggcgtaactgaagaacaggcaactaaaaangttttggaagtaaacaaatgatatatgtataaaattccacatgctgaaagcaacttgggaggagcaggaacttcttatacattttgtagtacctgcc

SEQ ID NO: 1888 - DNA, 530 bp, Homo sapiens
acaacatgacttaaaactttttttttttctattaaaacttaaaggggaacaaaacttgaaaaagccctgttcttcagaaggtgagtgggttgagggaggcagtaatatgaagtgactgctgtgtattttaactaccagattttttatatttgccactgttaaatagttggaaaggggaaattctgattaagcgaaagtggtatcatcctaggtaagcttatttcagaacaagtctaatatttcagattctttcttttcgactttatactctgagttattacttactgtaagtggtgtatatgaaacctccatgcattttccagtatggatctgctaatatgcacagtaaatccatgtctttgtttgtttttctattaaaaagcaatcaagaaagataatgtgaaaaagaaaggaatttagaggtagggaaaagatgaatgtcagacatttgaagaactatagtaaaatgataaacactaaatatacttgagaaaactttcttaatatgccaatgaggtaggcctgatctt

SEQ ID NO: 1889 - DNA, 337 bp, Homo sapiens
agaatacaacgatggattttaaatactgtttgtggaatgtgtttaaaggattgattctagaacctttgtatatttgatagtatttctaactttcatttctttactgtttgcagttaatgttcatgttctgctatgcaatcgtttatatgcacgtttctttaatttttttagattttcctggatgtatagtttaaacaacaaaaagtctatttaaaactgtagcagtagtttacagttctagcaaagaggaaagttgtggggttaaactttgtattttctttcttatagaggcttctaaaaaggtatttttatatgttctttttaacaaatattgtgt

SEQ ID NO: 1890 - DNA, 340 bp, Homo sapiens
accaggaaatgcaaaggaagaacatcttaatatgtttattcagaatctcctgtgggaaaagaatgtgagaaacaaggacaatcactgcatggaggtcataaggctgaagggattggtgtcaatcaaagacaaatcacaacaagtgattgtccagggtgtccatgagctctatgatctggaggagactccagtgagctggaaggatgacactgagagaacaaatcgattggtcctccttggcagaaatttagataaggatatccttaaacagctgtttatagctactgtgacagaaacagaaaagcagtggacaacacatttcaaagaagatcaagtttgt

SEQ ID NO: 1891 - DNA, 350 bp, Homo sapiens
  misc_feature 44, 45: n = A,T,C or G
accagcagcttccacgaacagcccccaaactcctcatctatggnnacaggaaccggccctcaggggtccctgaccgattctctggctccaagtctgacacctcagcctccctggccatcactgggctccaggctgaggatgaggctgattattactgccagtcctatgacagtagcctgagtggttatgtcttcggaactgggaccaaggtcaccgtcctaggtcagcccaaggccaaccccactgtcactctgttcccgccctcctctgaggagctccaagccaacaaggccacactagtgtgtctgatcagtgacttctacccgggagctgtgacagtggcctggaag

SEQ ID NO: 1892 - DNA, 464 bp, Homo sapiens
acatgagaaggaacttccaggtgttactgtaattcctcaacgtattgtttcgacagcactaatttaatgccgatatactctagatgaagttttacattgttgagctattgctgttctcttgggaactgaactcactttcctcctgaggctttggatttgacattgcatttgaccttttatgtagtaattgacatgtgccagggcaatgatgaatgagaatctacccccagatccaagcatcctgagcaactcttgattatccatattgagtcaaatggtaggcatttcctatcacctgtttccattcaacaagagcactacattcatttagctaaacggattccaaagagtagaattgcattgaccacgactaatttcaaaatgctttttattattattattttttagacagtctcactttgtcgcccaggccggagtgcagtggtgcgatctcagatcagtgt

SEQ ID NO: 1893 - DNA, 335 bp, Homo sapiens
cttctgcagtcatcgagaagtcctggatcttttgtggttacaccagcatcatgtggcaagcagaggcgacttccggaagagacaggcaggcaccgtgaggaaggtggctgtgctctcccaggtgtctcagagacagatgccttatttaaaatcagcacgacatgtgtgagatcttctgtttcctaccccaaatcctgaaaccctgcagacactggctgactgggagaggtggggtctgtaagttgtcccctagtttgctaaaaaaatctaaaataatatttattatatgagttaggagagagagaatgggtccgcgtggcctcctctgcagatgt

SEQ ID NO: 1894 - DNA, 199 bp, Homo sapiens
actacaaacctacaagatccaggagtgttaggttgccctcggacatgccttcacgccattctaaacatcttggagaaaggaacggaagggagaacaggcccagtggcggtgcgagaatctcctcagctggctgagctatgttaccaggtcatatatcagttatgtgcatgctctgatacatctggtcctactatgaggt

SEQ ID NO: 1895 - DNA, 222 bp, Homo sapiens
acagctacagcttcatcaaccttagaacggagtgactctggagactcgagcatatgaagaagttctgaattatcaatctccaacaacatgccagtgattttaccggcaagagtagggtgcatggcttgaataagaggaaacagccgttcacccaacatttgcttttgctcttgaggaggggcagatgccaacatggaagcagtcaaaggttcctgaccttgt

SEQ ID NO: 1896 - DNA, 207 bp, Homo sapiens
actaaagcattcatggaggctcttcaggctggtgcagacatctccatgattgggcagtttggtgttggcttttattctgcctacttggtggcagagaaagtggttgtgatcacaaagcacaacgatgatgaacagtatgcttgggagtcttctgctggaggttccttcactgtgcgtgctgaccatggtgagcccattggcaggggt

SEQ ID NO: 1897 - DNA, 187 bp, Homo sapiens
acgcttatcctgactgagggagattcagccaaaactttggctgtttcaggccttggtgtggttgggagagacaaatatggggttttccctcttagaggaaaaatactcaatgttcgagaagcttctcataagcagatcatggaaaatgctgagattaacaatatcatcaagattgtgggtcttcagt

SEQ ID NO: 1898 - DNA, 544 bp, Homo sapiens
gcggcggcggcgttgacaatgagttttcttggaggctttttggtccaatttgtgagatcgatattgttcttaatgatggggaaaccaggaaaatggcagaaatgaaaactgaagatggcaagtagaaaaacactatctcttctatgacggagaatccgtttcaggaaaggtaaacctagcctttaagcaacctggaaagaggctagaacaccaaggaattagaattgaatttgtaggtcaaattgaacttttcaatgacaagagtaatactcatgaatttgtaaacctagtgaaagaactagccttacctggagaactgactcagagcagaagttatgattttgaatttatgcaagttgaaaagccatatgaatcttacatcggtgccaatgtccgcttgaggtattttcttaaagtgacaatagtgagaagactgacagatttggtaaaagagtatgatcttattgttcaccagcttgccacctatcctgatgttaacaactctattaagatggaagtgggcattgaagattgtctacatata

SEQ ID NO: 1899 - DNA, 512 bp, Homo sapiens
acaagatgtgttactatcgctttggacaggtttacacagaagccaagcgtcctccaggctttgaccgtgtccgaaatgctgagattgggaataaagactttgagcttgatgtcctggaggaagcatataccacagaacattggctggtcaggatatacaaggtaaaggacctggataatcgaggcttgtcaaggacataaatgtcacgtccagctctgatatgcttcgcactgagcacatcacatttaggacgttgaagatttttttttttttttaatatgcagtttgtaagaacaaaactggatggcatcagaattgtctggaagttttgtcttgggcagtatgggctgggccaaatgaaatgatttttataattctaaacaggttaccaaatgaaatgtcatggctttactttggtcaattaaaggggggaatttttttaaaaaatgtgccttatttgttttgacttataactgatttgagggaggcaaaagctatgctaggctgccaga

SEQ ID NO: 1900 - DNA, 553 bp, Homo sapiens
  misc_feature 417, 488, 489, 501, 544: n = A,T,C or G
taggtattcctgatgacagtctgcctctatcttacagtaagttgtttttcgaattctatgggcctattatctaatagataacttagccattttgatatttgttaccaaagcctgcttaacccataaagttttctggttcctcttgttctctgtagtgatgtttctagatagatgcccactgatatatgccccttttttctcagatagatgcccactgatctgcccagggtcagacgaatgcttgtcagttgtagctttccaggattctgctccaatgaggaggaaacatcctgccttacccctgttttagcctgggaaccagtaattgtgaactcaccagggttaacatgaagagggcatgagagcttattccataaggaattgtctgagacatttggttaccttttcttagtttgnccattagcaaccgtaactaaaatagttttggctgtttttgggataattagctaattgaatgattttttcgnntcaggagcaagnttgttgctatataccattgaaaaagccttcagagctgagaggntagttgata

SEQ ID NO: 1901 - DNA, 195 bp, Homo sapiens
actgactggatatattttatgggcatgtagtgttgttaagtggtaaaatttaaagacatttaacctaaatgttccattttctcttaagaaaaaaaaggaagacgttttaataggaaaagaaaaacaagaagcagtagcagctaggtaatttaaactgagattaaaaaataaacatacacaaaaaatacaaaaagt

SEQ ID NO: 1902 - DNA, 288 bp, Homo sapiens
  misc_feature 69, 70, 243, 244, 251, 271: n = A,T,C or G
acaattacccaccactggatttgactcagagaggacccccagagggtgtctccatcttccctatttatnntcagcccttgagggcttcattgtagatcaaagccaaggcccccaggaaggtgacatactcctggaagttcacctcctggtccttgttccggtccaagtcttccatcagccttgcaatttcagcatcctgcagcttcgagccaatggtgagctccttctggatcagctccttcnnctccttnttgctcagggtgtgcttgtnaccctccctgccggagt

SEQ ID NO: 1903 - DNA, 220 bp, Homo sapiens
  misc_feature 12, 13: n = A,T,C or G
acaattacccannactggatttgactcagagaggacccccagagggtgtctccatcttccctatttattttcagcccttgagggcttcattgtagatcaaagccaaggcccccaggaaggtgacatactcctggaagttcacctcctggtccttgttccggtccaagtcttccatcagccttgcaatttcagcatcctgcagcttcgagccaatacctcg

SEQ ID NO: 1904 - DNA, 371 bp, Homo sapiens
gcaggggcccttagagtcttggttgccaaacagatttgcagatcaaggagaacccaggagtttcaaagaagcgctagtaaggtctctgagatccttgcactagctacatcctcagggtaggaggaagatgacttccagaagcatgcggctgctcctattgctgagctgcctggccaaaacaggagtcctgggtgatatcatcatgagacccagctgtgctcctggatggttttaccacaagtccaattgctatggttactccaggaagctgaggaactggtctgatgccgagctcgagtgtcagtcttacggaaacggagcccacctggcatctatcctgagtttaaaggaagccagcaccatagcagagt

SEQ ID NO: 1905 - DNA, 361 bp, Homo sapiens
acactggtttgctactcatggcaagaaacagacaaagccccatgaaaaataaaacaaaacaaaagtcatttcaaacaaagctgttgttttgaaaactcttgctttcttttggtgtccattttgtgttctattttaaagaatctttcatttatattggtgttattgtagtgaagagaatgtgataggctgatctgtaatggtttctgtcaggagcttagcaaatgcctctgcccctcttcccctacccctgtccttcctcagttcccagctgggattgctatgcactgggcagacccgtcactgtctcccctgaacccccacacagtggcttcccttagaaccagtctttgtacctcggccg

SEQ ID NO: 1906 - DNA, 472 bp, Homo sapiens
  misc_feature 137, 275, 280, 282, 291, 311, 318, 349, 372, 381: n = A,T,C or G
cttttttttttttttttttttttttttttgggcaaaattttttattatgaagatacagatctaagaacagaaggataattatgtgctagcttatatatagttccttgtaaaaataatgatacatgaaaaattagtanaaaatgaaaatctgcagttatctgatatctgaaaatgttaagcaatttcccctgcatcttagttctaatcacttttgcagaataatcaagcatatttgggtgaagagagtatttaatgattccatttttattaatagngtagngngcccttcanagcttggcgtagtctttaanaatcatntgaagtttctggctcagcatgatgttccctntggccttcagcctgccactaaanaatgccttntgagggtcaagcttgcccaggaccacctccatgaaatcttcatctgaaagtatgattgttgtatcagcagcaccttttgcagggccttggt

SEQ ID NO: 1907 - DNA, 309 bp, Homo sapiens
actaactacagatagaagaaaaacagtattaacatgtgtattacagcactgcagttcactttctggatttgtgacacacaaacacatcatgcattctaagaagttaattttattagtgtcactagtgatgttaattaaaaaacttatagcaagtgctcaaaactttctaaatattgtaatcactatgttttaaagacagagtggactgttacaaatgattttgcaaaatacaaaaatagatatacttccactgaatgctttaatcatttttccgggcactctcatcttttggttcttcctcatctgagt

SEQ ID NO: 1908 - DNA, 283 bp, Homo sapiens
actgtatttatatttgtgggtggcagctctcaaattatttatccatagtccagatttgttttgttgcatttgctcttaaaatgcattgttgtatactccatcacagatgtgtcaaatactcctgctgtcttttgaggatgtagcaaaacctaaacctgctactttaaaccaaagtcctttttttattattgtaaagctgacattttactctgatttaagcacctgaagtgtattttgactaatttatattctgagctaaaattaagaacctcaggatttgtgt

SEQ ID NO: 1909 - DNA, 429 bp, Homo sapiens
  misc_feature 203, 204, 370: n = A,T,C or G
accaccacacccggccaatttttttatttttagtagagtgttgccacgttggccagtctggtctcaaactcctgacctcaagtgatccacctgccttggcctcccaaaaaggactgggattacaggcatgacccaccatgcctggcccaatgttaacacattttgaaaaataagacaatcatggaaataagtgatgacactanngaattattcttttaggtgtgataatgatgacttgcagttatgtttttaaaagacttcatacctttagagatatatatttaaatacttacagatgaaaagacatgatgtctgctgtttgcttcaaaataatcttgggtggggaagagtggggctacaggtgaaatangacagacctggagttgactattttggggactggggaatggctacatgggggttcattgt

SEQ ID NO: 1910 - DNA, 257 bp, Homo sapiens
actcagaggcacttccctcctaagtcaaagaccatcctcactgactatgtgccaacgcctcgtttcaggcttgtgactcaacaaagggcttttccattgatagaagcagtttgggatttgtagttgcgacttcttcgatagttacctgcacgtccattgctggcaactgacttgtcattaaaacctggctctttggttaagggagctacgctgtggtttattcttaagttacgtggataaactaacctctaaaaaaa

SEQ ID NO: 1911 - DNA, 274 bp, Homo sapiens
acctcaccatccacagtgaccatgagggtggcaatgtaagtgcccataccagccatttggtgggcagtgccctttccgacccttacctgtcctttgcagcagccatgaacgggctggcagggcctctccatggactggcaaatcaggaagtgcttgtctggctaacacagctgcagaaggaagttggcaaagatgtgtcagatgagaagttacgagactacatctggaacacactcaactcaggacgggttgttccaggctatggccatgcagt

SEQ ID NO: 1912 - DNA, 197 bp, Homo sapiens
acgagtaagggtttgatctacaaaagagctcacatggacgcactgagaacgcctgccagcttccccatgccctcacttggtttgtgttttaggttaagtagtcagtgcccacatcacttcactgtctcaagactgagcacttcactaaatggtagattttactgttaaagaccctacaataagattgttttatctgt

SEQ ID NO: 1913 - DNA, 302 bp, Homo sapiens
acaacagatcaagaagtatggcagtgacaactcgtttgacatggttgcacgaaaagatcctgcaaaatcattttggagggaagcggcttagccttctctataagggtagtgtccatggattccgtaatggagttttgcttgacagatgttgtaatcaagggcctactctaacagtgatttatagtgaagatcatattattggagcatatgcagaagagagttaccaggaaggaaagtatgcttccatcatcctttttgcacttcaagatactaaaatttcagaatggaaactaggactatgt

SEQ ID NO: 1914 - DNA, 322 bp, Homo sapiens
acttctgcaggtgtttctctgtggcagggtaaaccacggtcgtctttacatcattcagttgtcttggagggaacaagtgataggtgctgtagatatcattggagaactgcaattggagctcagggctgcccgtcaggagctgagccacctgttccacctgaaatggcgtcttctccaggatcacaacggcatcctctccatccccatccccagaggcctcattcaccttcccgtgtaggaaaatgattttgtcccgcgcagactccctcagcaccttctgcagtctgaagccggagaacggtaagcggacaggagcacaggt

SEQ ID NO: 1915 - DNA, 333 bp, Homo sapiens
accatgcactgagtgactgtggggatcatgttgttataatgaacacaagacacattgcattttctggaaacaaatgggaacaaaaagtatactcttcgcatactggctacccaggtggatttagacaagtaacagctgctcagcttcacctgagggatccagtggcaattgtaaaactagctatttatggcatgctgccaaaaaaccttcacagaagaacaatgatggaaaggttgcatctttttccagatgagtatattccagaagatattcttaagaatttagtagaggagcttcctcaaccacgaaaaatacctaaacgtctagatgagt

SEQ ID NO: 1916 - DNA, 246 bp, Homo sapiens
acagacccagaaagaacaggtagtgagtagttatggtctcagcctctccagtcttgctgatcatgaagagctggggcaggatagccactgattccagatagatagagaaagtccagaggatctccagcagagtgaaactgtagttttcaaggaaggaaaggccaatgactgggaccagaagaaactccaggcggaatgtgtcattctcactgtcaaaagttttacggaatttcccatatatcatgt

SEQ ID NO: 1917 - DNA, 282 bp, Homo sapiens
acaaatgcaaatactgttcccttgtgtcaattacatacagcatgcctacaaagagagaatggtaattcttcttcattcacagacaggacacatggcagtgcactattcaaaatgctttgataatcttaatttttgtttctggtgctgagatattatgaaaggaactgcatttgcaacttattaaatacttccaggaacaaatagttcactttgcttgggacttgtagttttgagtaattaatcatccatggagcaggagccagtcaggagatacccgttggt

SEQ ID NO: 1918 - DNA, 460 bp, Homo sapiens
acatattaagataaatgtcatgtgtaagataactgataaatattggaactttgctagaacaagaccctgtagtaatagtaataatagttgaagtttggccaactcttaataaagttattttggtaactaatgttttatggcacttaagaataattagcagcgttaaattttgtttgtattaagcacttttaattttatccttcctaaaaatagtttattgtatctgacaagaaacttacttaaccattgtgtccttcccatcttttttgtcatctttgttttcttcaaatgccctcctcccatctgccttgagattccctcgtcttcacttaaaagccagagtgcaagtcatgatttgcgggagggctcttgaaccacttctggctgcaccacaattctgtacctgcccgggcggccgcccgggcaggtacctggagctgcagacctgggggttgcccat

SEQ ID NO: 1919 - DNA, 515 bp, Homo sapiens
accgaccatagagcaagaatcaagattctgctaactcctgcacagccccgtcctcttcctttctgctagcctggctaaatctgctcattatttcagaggggaaacctagcaaactaagagtgataagggccctactacactggcttttttaggcttagagacagaaactttagcattggcccagtagtggcttctagctctaaatgtttgccccgccatccctttccacagtatccttcttccctcctcccctgtctctggctgtctcgagcagtctagaagagtgcatctccagcctatgaaacagctgggtctttggccataagaagtaaagatttgaagacagaaggaagaaactcaggagtaagcttctagcccccttcagcttctacacccttctgccctctctccattgcctgcaccccaccccagccactcaactcctgcttgtttttcctttggccatgggagggtttaccagtagaatccttgctaggttgatgtgggccatacat

SEQ ID NO: 1920 - DNA, 510 bp, Homo sapiens
  misc_feature 15: n = A,T,C or G
acaaccataatgcangttatgttttgcatacaaaatatgttctttacatcaaagcacatgttaacaaaaacaagttctagaaagcatataccctctaagactaatgaaaacgtctttagcagggaattaaaaaaaaattaacattcatttgataaatattttgtagaacttgaaatgaggattttatctctgagtattttttgtagtattccccttgtccagtttttgcagaagaatggcaaacacttatttctaaaatgaaatagccctggaaacacccagtggaattttttcaaagtaaatgtctagccttaacttgaagttcaagaagttgtagctacatactacattagtaaaatctgaaataaaattattcccagttaatctcttcacagtttcttaaaaaaatattagtggagataaattatctaccaactttaaaaatctaaacttatgttcactgaacaaaaataaatttagtttcagaacattgcctgttaacggcaaagt

SEQ ID NO: 1921 - DNA, 257 bp, Homo sapiens; identical to SEQ ID NO: 1267

SEQ ID NO: 1922 - DNA, 221 bp, Homo sapiens
acaataaatagagtgctctccaatcatggtgaatcctttattacatgcatacgttacagactgtctatatccataatggtcacgttccccttgaattattccattgtcaatttgtggtggtgctggacaataaatttctctgcactctggcaacgggtcactccactggacagagctgcctgaaataagacaaaaactagaagtcgagccaaataatttgt

SEQ ID NO: 1923 - DNA, 355 bp, Homo sapiens
accatttaagtcagtttcttatttgagtatgaggtgtctatacatttctataatttaagattttggtaacgcttcatatcaaatgagttgtagatctacttaacgtatgacttctccttccaaagaaggaaggaaggctgacaagggagggagaagggatacctgctaatgatgatgtgctagaaagacgactcattacatgcttatcattgctggaaggacttcttccctccactgagccgtgggatgtcataagagcccttcgaagagctctttttggagttttggagaaagagaatgctcttgtaaccttttttgaagtcttttttattgctcttgatgctctactcaatgt

SEQ ID NO: 1924 - DNA, 420 bp, Homo sapiens; identical to SEQ ID NO: 1848

SEQ ID NO: 1925 - DNA, 196 bp, Homo sapiens
catctctccctcccaaggaaaaagaagtgtgactactggatcaggacttttgttccaggttgccagcccggcgagttcacgctgggcaacattaagagttaccctggattaacgagttacctcgtccgagtggtgagcaccaactacaaccagcatgctatggtgttcttcaagaaagtttctcaaaacagggagt

SEQ ID NO: 1926 - DNA, 257 bp, Homo sapiens
  misc_feature 49, 50: n = A,T,C or G
actcccgattgaagcccccattcgtataataattacatcacaagacgtnntgcactcatgagctgtccccacattaggcttaaaaacagatgcaattcccggacgtctaaaccaaaccactttcaccgctacacgaccgggggtatactacggtcaatgctctgaaatctgtggagcaaaccacagtttcatgcccatcgtcctagaattaattcccctaaaaatctttgaaatagggcccgtatttaccctatagt

SEQ ID NO: 1927 - DNA, 113 bp, Homo sapiens
  misc_feature 55: n = A,T,C or G
tggttgggggccgtcccgctcctaaggcaggaagatggtggccgcaaagaagacnaaaaagtcgctggagtcgatcaactctaggctccaactcgttatgaaaagtgggaagt

SEQ ID NO: 1928 - DNA, 119 bp, Homo sapiens
accttcagaatgcgattgagagcagacaggctcggcccacctatgcaacagccatgctgcagagtctgttaaagtagatgttgcacaccagccttacagctgggagcctttgccatggt

SEQ ID NO: 1929 - DNA, 331 bp, Homo sapiens
actttggcctctctgggatagaagttattcagcaggcacacaacagaggcagttccagatttcaactgctcatcagatggcgggaagatgaagacagatggtgcagccacagttcgtttgatctccaccttggtccctccgccgaaagtgagcggagtttgtagagcttgcatgcagtaataaatgccaacatcctcagcctccactctgctgattttcagtgtaaaatctgtgcctgatccactgccactgaacctgtcagggaccccggaggcccgattagaacccaaatagatcaagagctgtggagactgccctggcttctgcaggt

SEQ ID NO: 1930 - DNA, 310 bp, Homo sapiens
accctaggggttctggaagggaaaacatggaatcaggattctatagactgatgggccctatccacaagggccatgactgggaaaaggtatgggagcagaaggagaattgggattttagggtgcagctacgctcaccctaaacttttggtggcctggggcatgtcttgaggcccagactgttaaccaggctctgctggcctgtttactcgtcaccacctctgcacctgctgtcttgagactccatccagccccaggcacgccacctgctcctgagcctccactatctccctgtgacgggtgaacttcgtgt

SEQ ID NO: 1931 - DNA, 364 bp, Homo sapiens
acttaatttctctttttaatttaagtgatctttctaattcgaaagctgtgttctttttgaataccgtgcatgggggttaagctgatgttaaaacagtttgcagtaaaaaaaaatgaatcagcttaagtcatttaatcatttcaagtgcattctgcatcctttaaaaataagtttaagaaatttaagagaattgtgttttcattaagttttgcatatcttttgttatgccatgtaaattccctttttcgtatgattaaaggaaggttatgataaaatgattagttcatttacattcacttgtagcaattacatgagaatttgaattttgtcgtgtttgggtttgttcattcctgtgaatgatggt

SEQ ID NO: 1932 - DNA, 145 bp, Homo sapiens
  misc_feature 17, 18: n = A,T,C or G
accaggtctgtgcaccnnatatgaatgtcttgaagagtcatgtggaacaacttgtccaaaatcaattcatatgaaagctttcagagtaaatttttttttctagctataagcatgcaataataaatctcaaacactgatttggagt

SEQ ID NO: 1933 - DNA, 308 bp, Homo sapiens
acatttattcttaacacgtggaacatatagtataaagatttcatactgaataaatgatattcattaagccaaaaaaggaaaaaaaggaggaatttacatcaagttttagctacattgttgaaatacaaatatgcagattttatcactgaaaaaatctcaattgtgtttcttcatcagaacttcaactgaacctagaactttttcacacctcgattagaaagaaaacaaaacaaaacaaaaacccagaaaaaaataaactataagttgattggctgctgagacagcaaggactttttacagagacctgt

SEQ ID NO: 1934 - DNA, 363 bp, Homo sapiens
actagaaccataaagttctatctgatggtaaattatgtataaaactaagataaaacagataattatgctctatctcatatctactgaaagtagaaaaggaggaagagtgacacttttaaatcaaactgctctagttttagcttagtggatggttaataaacacactgctttacgctgaagtgatcagatagctatttctacagttcagaagaacttaaaaatcaggttttaaagacaaaagaaagcagactcaaaacacagacaaagcagagaagaaaacaatgcccatgagatggtcactatttagacagtattataaaaagctaaagaacacttgggctttacttcactttgatgtcttgt

SEQ ID NO: 1935 - DNA, 177 bp, Homo sapiens
ttcaaacaggatgacaatccccatgcatgtgatatgcttgctttctagattgagtcactcactgtcatgactgcccatcctcattgcctgtgcttcccacttcaccactctctcacattggctgttcatggaaggctgttttctgtgctctcatgcttctcccctcgcgtttcctgt

SEQ ID NO: 1936 - DNA, 521 bp, Homo sapiens
atcggaggtgcctcagccatggcatggatccctctcttcctcggcgtccttgcttactgcacagaatccgtggcctcctatgaactgactcagccaccctcagtgtccgtgtccccaggacagatagccaccatcgcctgctcgggagagcaattgggggataaatatgtttgctggtatcagcagaggccaggccagtctcctctactgatcatctatcaaaataccaagcggccctcagggatccctgagcgattctctggctccaactctgggaacacagccactctgaccatcagcgagacccagtctatggatgaggcggactattattgtcaggtgtgggacagcagcctgggttatgtcttcggaactgggacaagggtcaccgtcctgggtcagcccaaggccaaccccactgtcactctgttcccgccctcctctgaggagctccaagccaacaaggccacactagtgtgtctgatcagtgacttctacccgggagctgtgacagtggcctg

SEQ ID NO: 1937 - DNA, 216 bp, Homo sapiens
acctactggtgctgaaaaaaggaaaattccggcttgaaggaaaggagtttagaactctgaaaatttggtgacattgtttttccctgaaagaaatgtgtgttggatttaacagatgaaattatctgccctccaaaagtcctttagaagagccagtgcaaggctgaagaccaaagcgtcaagaacacgccagactctcagcttcctctgctttgctcc

SEQ ID NO: 1938 - DNA, 359 bp, Homo sapiens
ctcctgtggaggcctgctgggaacgggacttctaaaaggaactatgtctggaaggctgtggtccaaggccatttttgctggctataagcggggtctccggaaccaaagggaacacacagctcttcttaaaattgaaggtgtttacgcccgagatgaaacagaattctatttgggcaagagatgcgcttatgtatataaagtaaagaacaacacagtcactcctggcggcaaaccaaacaaaaccagagtcatctggggaaaagtaactcgggcccatggaaacagtggcatggttcgtgccaaattccgaagcaatcttcctgctaaggccattggacacagaatccgagtgatgctgt

SEQ ID NO: 1939 - DNA, 523 bp, Homo sapiens
accaagttttagatggagcaggattagatattgatttccatcttgcctctccagaaggcaaaaccttagtttttgaacaaagaaaatcagatggagttcacactgtagagactgaagttggtgattacatgttctgctttgacaatacattcagcaccatttctgagaaggtgattttctttgaattaatcctggataatatgggagaacaggcacaagaacaagaagattggaagaaatatattactggcacagatatattggatatgaaactggaagacatcctggaatccatcaacagcatcaagtccagactaagcaaaagtgggcacatacaaattctgcttagagcatttgaagctcgtgatcggaacatacaagaaagcaactttgatagagtcaatttctggtctatggttaatttagtggtcatggtggtggtgtcagccattcaagtttatatgctgaagagtctgtttgaagataagaggaaaagtagaacttaaaaactccaaactagagt

SEQ ID NO: 1940 - DNA, 378 bp, Homo sapiens
acatatgtgaactcattggaaatattgtgtgtttaatgcaaatgatatattgaattgtttagcaatttgttttctttgcttaacgatgtttttgagatctgtgcatgttacttaatgtagctcaatccatcttctgtaattgctgtatagattgtcatcatatgattaccacattttacttacgcatttcttttgtgatggacattaagactgtttttaggttttgctattacaaaatactacacaggagcatcactatgcctgtgtgaaagtatatgtatgaaagtttacctagggttgattcctagaagtggaattgcaaagtcataggatatttatatattggtttttaataatacttccaaattgccctcctgt

SEQ ID NO: 1941 - DNA, 423 bp, Homo sapiens
  misc_feature 352: n = A,T,C or G
tcttaatacagggatgatctcatagcatttagatatcagaaaaggttttgacctatatgtctttaatattttttgaatacatgtataatctttatcattcctcagtgtttcatttctcaaattctgtaaaaggaatataagaggaaagacaattcatatacaaagacaacgagattaaaaatatgcagtaggaaaaataattacttaaggggagattttttttacatgaaatctgggctttggatgtgtgtgtgtgtgtgtgcacatatgcactgtggtgggagtggggcaacttggggaatatgttacatgtgtgactttgttttgccctggcaaagttaatgttgttcanaaagggtaaatgtttggacacttgcaattgctcatggatgaatttatatgttttagtcatagaaaaattgt

SEQ ID NO: 1942 - DNA, 292 bp, Homo sapiens
acctgactcaccaggtggctatgaggatgcagtcatgataaatgtaattgctcatatggcacctggtttattcaaaaagtgtttttcaaacatctaggtggcagattctgttacataagtaatggagagacagtggtgaactaaacaggcaaaaatttctgctttcatggagctgacattctggtaggcacaaagcaagccttaatatgtaaaatctatctcattataagaggaagtgatgtttgttagcatctgctgtgtgccgcagttatatggaggacctaaaaaaaaa

SEQ ID NO: 1943 - DNA, 394 bp, Homo sapiens
acgcgaaattgtgttatgactgatagccttcagctacaaaaagataggactgacctggtttaaagtgttctattttgtaaatcattccatttgagtctttctgatgaacttggctatactgaaatctgttattttagtgaggctccaaaatgagcaaagctaggcctgattagagtagagtgactattaaaaaacataactttctaggagccataaatcaaagttttaaaaagatgtttggatatatttgagtattccgatcatgaaaacagaaattgccctgcctactacaaggacagactgatgggaaattatgcacctggtcaacttagcttttaagcagacgatgctgtaaaaactaacggcttctctgatatttattgtaagttttagt

SEQ ID NO: 1944 - DNA, 530 bp, Homo sapiens
acacacatgttctcatatatgtatatatacatacatattcatatatgtgtatacatatatacatatgaaacaagtttttaaatgttggcagcatattttcacaactgcaacctaaacaaccactggaagtgggggtccacttaagttttgtttgccattagcttaataggggaaagctattttaattttccctgcaactttttggatatgagttatgatctcaaaatgtcatttaactattgcactaaaaagtaatttgaccttggaactcctttctagatggaaggagaataaagacatctgtagcatgtaattctatttttatttcttgactacataacctagcagtggtctaatactgaccgtttcaatttaaatgctggaaaaatactgaccaagactttctgtgaaaaagataatggaaaacagaaaccagttagtaaagccatgcaaataggaagtgattttcagccccaagaggactttgtatcatctatggctccatttaaacccaagtagcatctgtcctg

SEQ ID NO: 1945 - DNA, 329 bp, Homo sapiens
ggagcctgaactgacatcaactcccaatttcgtggttgaagttataaagaatgatgatggcaagaaggccctcgtgttggactgtcattatccagaggatgaggttggacaagaagacgaggctgagagtgacatcttctctatcagggaagttagctttcagtccactggcgagtctgaatggaaggatactaattatacactcaacacagattccttggactgggccttatatgaccacctaatggatttccttgccgaccgaggggtggacaacacttttgcagatgagctggtggagctcagcacagccctggagcaccaggagt

SEQ ID NO: 1946 - DNA, 480 bp, Homo sapiens
  misc_feature 403, 459, 471, 472: n = A,T,C or G
acctcagaatagggcacctgtaagtcagtcagtgaagtctctgctctaactggccaccggggccattgtcttctgacacagccttgccaggaggcctgccatctgcaaaagagagttcactccttccgctattttcatgtgagtgtatccaatttccttgataagctccagtttcaggtattctgccatttggaaagttttacacactcgaaagatgttgccaatgatatcttctggtgagtagcccagatgccacaagtgagcaagaatcttgtaggcttcatcaatgttggcattcacacagtgctggatcatctcctttaccagcagtgggtggggctcgtcacagaccttgaacacgttctcactgttaatgaagccaaatcctgagaaggtggactgnaggttgttcagcgcctgcctcatgtctccctgggccgtgaagatgatggcttctangccgtcatcagnntagggtac

SEQ ID NO: 1947 - DNA, 498 bp, Homo sapiens
actttttacccccagcatttatgatgtaaatctctttctctatggattatatctgtttaaagcattctttctaggttattttggggggacagtgccaagtccatctttgcccagtcaattcagtgattgatagcaatttacattaattgcagtaaagctctttggattagaaattagtgtggggaaagcttattctgttgttgtttttgtttactttcatatgatgaaaatgctgtgtttaagtgtttgtcaataggaagaatggaaaactgttgggatgatgtggtttgcaggttgctgtgcctgattcacagtgtatgttgtataagccaatgtccatacctgattatgagagcttcttaaattatatgatatcaaatttgttcctgtaactctgtatacagtgcttttctgcaaggtaaaaataacctgtctatgcatctgatttttgctacagtttagacactgtggtttacaaaacagcatgcactcaacttg

SEQ ID NO: 1948 - DNA, 289 bp, Homo sapiens
actggttaatgaagctaacttcaactagtggaccatgggtagtttagaaaaacacatttccaaccatccatccgcacgcaatgcacctttgtctctaacatcctactgatcttggaaaacacaggccatcagaaaggatgagcaggggctctgaacttattttaagatctcgcaatgccagcaacggcccctttgttgggataagtttacaggtatatttcacaggacaaaaacgcttgtaggaaaaacatggttgggtgtgtgtatactttgatgatgaagatttcac

SEQ ID NO: 1949 - DNA, 207 bp, Homo sapiens
acttacgccataccccagaatacaataaataagcaattagaaaacgttcaagtatgaagggatttcctcctccccgccaaaagcactgctctctgaaggaagctggtttctctgtagctacaccagctgttcagaagctcattggacctggttttgaaaataaaacaaagttaaaaccctgggaggagttattgtgcagtgtggagt

SEQ ID NO: 1950 - DNA, 454 bp, Homo sapiens
acatttgtatacctgtaatgtaaatgtggagaagtttgaatcaacataaacacgttttttggtaagaaaagagaattagccagccctgtgcattcagtgtatattctcaccttttatggtcgtagcatatagtgttgtatattgtaaattgtaatttcaaccagaagtaaatttttttcttttgaaggaataaatgttctttatacagcctagttaatgtttaaaaagaaaaaaatagcttggttttatttgtcatctagtctcaagtatagcgagattctttctaaatgttattcaagattgagttctcactagtgtttttttaatcctaaaaaagtaatgttttgattttgtgacagtcaaaaggacgtgcaaaagtctagccttgcccgagctttccttacaatcagagcccctctcaccttgtaaagtgtgaatcgcccttcccttttgt

SEQ ID NO: 1951 - DNA, 166 bp, Homo sapiens
acaggacacaggcactcctttgtctggtagagaggaggaggggaaatggagctattccaggatacaagggatggcactgagggatgcataagtcccctgcctcccttgtctcaacatgttctcctctgccagcccagtcagcttggggagctaggtatcagaaacc

SEQ ID NO: 1952 - DNA, 220 bp, Homo sapiens; identical to SEQ ID NO: 1076

SEQ ID NO: 1953 - DNA, 276 bp, Homo sapiens
actagtgggtctctgctcccagtctcttctctgtgccagccgtcgtggcctactggaatggcacagagagcttttcttttcgttgcagaacagcctggaacatgacatgctagatcaatgtccatacacgtccacagaaataaatgaatgttccttctgccatgactcatgtctcggggacaacgggttcgcccgtctagggtgtgagctgacgcacacttcactccctctgacctggaatgtgtggggcttctaactgcggttttcaggttttac

SEQ ID NO: 1954 - DNA, 448 bp, Homo sapiens
acttaatttgcatgttccatttcaaaaagttgtttttaagatttcagagaatttttttcaaagaaatttcttaaagctaacttcatttagagcttggcaaaatgtatcagccaggcacagtagttcatgcctgtcatcccggcacttaaggaggccgacacaggaggatggcttaagcccaggaatttgagatcagccttggcgatagagcaagaccccatctttacaaaaaaatgtttaaaaattagctgagcctggtaatacatgcctgcagtcccatatgcaaaacatagctggggctacacgggagggtgaggcaggaagatcacttgagcctgagagttggaggatgcagtgagccatgattgtgccactgcactccagactgggtgacagagtgagatcctgtctctaaaaaacaaaacaaacaaaaagctaaaaaaaaaaa

SEQ ID NO: 1955 - DNA, 577 bp, Homo sapiens
  misc_feature 473: n = A,T,C or G
acaaacccaggcctgggcctaggaaagggcagaagaaaggcaaagggtcccttggagcaggaacccatccctctctgcttatacccagcacccctcatcccaggttcctttcttcaacctccgcctgcctctgggaacacagagcaccaagaactgacaaaccgggaccctccagggccacagcgtggggcagagtccaggcttctgtctccccgcagtgggagatctggggagctcagtgaacctcctcaccctcctgccagtatgaagttgggaagcgccttctctgtcccccagaacagaacaaactcttgttctctgtggttggggaaaaggtgtggggggcttggacctaggaagaagctgagctgaattcctccagggcccaggtgaaacccccaggggagtttctgagactctagacttgccatttctccacttttccttcccaatgactccggtgagcagctcanagtctggctagggcaactggtaggacagtggggatctgccccagagacatctgtgggtttcagatgaaggtttccccaacaccagattcatttatatgtacctg

SEQ ID NO: 1956 - DNA, 327 bp, Homo sapiens
acctgggagagctgcaaacagccatggagataagagaggcggggagggaacacagtgactgagtctgagagacagcaaagcacctctccagcgaaagccactccgagatgcagcctaacttcctagtttgcatcagcaagatgagcaggcaccaccatggaaagagcacctggggtgtagctggttaccacagctcagccacattccccagaaacggaggtcagccctccatggcccaggaaaacatgggggatgaagggttggcacctgcagtgaccagatggagatacaatgcaggcagctgctaccatgcttggtgaccagggt

SEQ ID NO: 1957 - DNA, 179 bp, Homo sapiens
  misc_feature 58, 83, 84, 93, 94: n = A,T,C or G
ctgtggccaaggccccagtgaaagcagctaccacccctacccggaagagttctagcantgaggattcctccagtgacgaggannaggagcaannaaaaacccatgaaaaataaaccaggtccctacagttcagtccccccgccttctgctcccccaccaaagaagtctctgggaaccca

SEQ ID NO: 1958 - DNA, 321 bp, Homo sapiens
acctaataatatgttaacataaacataacaacacacatattatttttctaccccttggcaactgaaaatgaagttaccattcctaggccaaatttttagacaaagctttctaaaaccatctttataaagtaaattcagatatgcttacaataaaaagacataaaagattcatcctgagatgaattctgagtcaataactaaaaaccatttctaccagtgcatcactaccatgtaatccattctacgcaagctctacaaatattgagtcaaatcctgtctgtcagaaaatgaagacccaataagtttgccgaagtattcagt

SEQ ID NO: 1959 - DNA, 480 bp, Homo sapiens
  misc_feature 450: n = A,T,C or G
gggatggaaccctgcgcctctgggatctcacaacgggcaccaccacgaggcgatttgtgggccataccaaggatgtgctgagtgtggccttctcctctgacaaccggcagattgtctctggatctcgagataaaaccatcaagctatggaatatcctgggtgtgtgcaaatacactgtccaggatgagagccactcagagtgggtgtcttgtgtccgcttctcgcccaacagcagcaaccctatcatcgtctcctgtggctgggacaagctggtcaaggtatggaacctgactaactgcaagctgaagaccaaccacattggccacacaggctatctgaacacggtgactgtctctccagatggatccctctgtgctttctggaggcaaggatggccaggccatgttatgggatctcaacgaaggcaaacacctttacacgctagatggngggggacatcatcaacgccctgtgcttcag

SEQ ID NO: 1960 - DNA, 272 bp, Homo sapiens
cttccagttgctcccagaactcgaacttctcaagaagaattgctagcagaagtggtccagggacaaagtaggacccccagaataagtccccccattaaagaagaggaaacaaaaggagattctgtagaaaaaaatcaagattactatgacatggaatccatggtccatgcagacacaagatcatttattctgaagaagccaaagctgtctgaggaagtagtagtggcaccaaaccaagagtcggggatgaagactgcagattcccttcgggt

SEQ ID NO: 1961 - DNA, 354 bp, Homo sapiens
acaaaacagaatgaattcttaaggcatatcagaaatgctgagtcccaggccggggccctgccccagccagggctgggactctgcagttgggagcttgtccagctgccccctctaatgcttttctcctccaggacacagggagcctccggaagcacagtagtccccgtgtgtcaccttaggctgacctctgtccccaggggtgacgtaatgctgtcactgtcttgaattcttcatcgtttaacagggagcccagtgttttcactttgcgcattgggtatctggtcttgcctgtcctaccctgaacctgggttccctgggccatgtaacacccaggcagctctgatgcccctgggt

SEQ ID NO: 1962 - DNA, 388 bp, Homo sapiens
  misc_feature 14: n = A,T,C or G
accttttaaataantataagggatggcaaagtttttccctttaaaaatactcactttatgcttataaataggttaatgggctgataaaaggttttgtcaaacattgcaagtattcggtgctatatataaaggaggaaaaactagttttactttcagaatgatttaaacaagatttttaaaaacaagatacatgcaagcgaacagcagggttagtgataggctgcaattgtgtcgaacatcagattttttgttaagaggagcaaatgactcaatctgatttagatggaagtttctactgtatagaaatcaccattaatcaccaacattaataattctgatccatttaaaatgaattctggctcaaggagaatttgtaactttagtaggt

SEQ ID NO: 1963 - DNA, 194 bp, Homo sapiens
  misc_feature 12, 13: n = A,T,C or G
actatagggccnntacgggccctatttcaaagatttttaggggaattaattctaggacgatgggcatgaaactgtggtttgctccacagatttcagagcattgaccgtagtatacccccggtcgtgtagcggtgaaagtggtttggtttagacgtccgggaattgcatctgtttttaagcctaatgtggggaca

SEQ ID NO: 1964 - DNA, 158 bp, Homo sapiens
accccgtggaccttcggccaagggaccaaggtggaaatcaaacgaactgtggctgcaccatctgtcttcatcttcccgccatctgatgagcagttgaaatctggaactgcctctgttgtgtgcctgctgaataacttctatcccagagaggccaaagt

SEQ ID NO: 1965 - DNA, 164 bp, Homo sapiens
ttcaaattgtcttctccacgaggtggaatgaagaaaaagaccacccattttgtagaaggtggagatgctggcaacagggaggaccagatcaacaggcttattagaagaatgaactaaggtgtctaccatgattatttttctaagctggttggttaataaacagt

SEQ ID NO: 1966 - DNA, 93 bp, Homo sapiens
caggcacccatccctactgacacggtctccctggggaccctgtcagcatgtccatgggacttggtcctgatgttggaccgtaagactccaggg

SEQ ID NO: 1967 - DNA, 345 bp, Homo sapiens
  misc_feature 18, 192, 193, 214, 215, 238, 307, 308, 315: n = A,T,C or G
acggaccatgtgctatcntataaatcgaatggcttaaactaatttgctatgatcctctaacaccgaaatttcccataaacttaagtgcctacacttaggacttttgaactttcagtcatctttttcgtggtgtctcactgaacgatgtgttagaacatgtgttccatttggagttttgggcctgtgcacggnnaaccccaattaccaatttagnntgaggctggattcgattgctcanttcacctgccacgttctctccaaggagtggggtctacgtgacctttagtcctctacctcagagccccgnntcatttntgaccaccccgttctgtgtcctcactcttg

SEQ ID NO: 1968 - DNA, 507 bp, Homo sapiens
  misc_feature 378, 458, 496: n = A,T,C or G
ctcaggaggcagcgctctcgggacgtctccaccatggcctgggctctgctattcctcaccctcctcactcagggcacagggtcctgggcccagtctgccctgactcagcctgcctccgtgtctgggtctcctggacagtcgatcaccatctcctgcactggaaccaccagtgacgttggtgcttatgagtatgtctcctggtacctgcccgggcggccgcccgggcaggtactcaataagtggtattgagtaactagtaatactcattggaacttaaaacatcatcttttatccaaaaatttcaaagggcaatataggaaagtattacaaattttacataaaaagaagatgaaacatgagaaaaaacaaagttatttncctgcaaaagcagatcaaatagtgagacaaggaactttgacttctagtccctttaagcaggacgtaactgctagacacantctgaatgtctagatatatttataactaaacttacaangatcaaaaaaa

SEQ ID NO: 1969 - DNA, 258 bp, Homo sapiens
  misc_feature 15: n = A,T,C or G
acttcttgtcaaatnccttcttgatatgagccgcaatgtccttctctatgttgtatttctccagcgcctgagtagcgcactccaccgagtcctgttgcatctcttccgacatgtccgcatttttgatcacggcctttcggtcgcacatggttacctagtgggcaaggccgtggagaagggggctggccgactgcaacggtctcctgggggaggtgctagcacagctcaggcccggctagagctaccgtcgctaccgaa

SEQ ID NO: 1970 - DNA, 256 bp, Homo sapiens
  misc_feature 14, 15: n = A,T,C or G
ctgaagtggcagcnncatcagggattgcttcctcctggtatgaccatagatttgtttcgaggcaaggcagctgtcaaagatgtggaagaagaaaagtttcctacacaactgagcaggcatattaagtttggtcagaaatcacatgtggagtgtgctcgattttctccagatggtcagtatttggtcactgggtctgttgatggattcattgaagtatggaactttactactggaaaaatcagaaaggatcttaagt

SEQ ID NO: 1971 - DNA, 373 bp, Homo sapiens
acaacatcgatgaaattcagacatacaatgtaaagttgaaataatcccaaattattttacattatttatgtatactttacaaataacacaaatatggaaatgttttcttggaaagctgttggaactgtaagcactgcaacgtatgaaagaaacatatttagcaataaaaaatttaataatatcctacaactgaattagttgcatatttataccattcaaaatcttgattttaacctcattcactcctttgaaaaatacattcctcttttgttcttttaaatgcaaaattagtggcagttgcagcaaaaacgccgaaattctataagaaaaaaactgatttaccccaaacatatcattcagcacaaactgcggt

SEQ ID NO: 1972 - DNA, 321 bp, Homo sapiens
accgaacacaggaaagaagagtgggaaattgaaggcctcctataaacgggattgttttagtgttggcagtaatgttgatatagatttttctggaccaaccatctatggctgggctgtgttggccttcgaagggtggcttgctggctatcagatgagttttgacacagccaaatccaaactgtcacagaataatttcgccctgggttacaaggctgcggacttccagctgcacacacatgtgtgagtgtttataatttattccttagtatcagtgcagttgcccaaaatattgtagccattagcatgctgagaagtgatggt

SEQ ID NO: 1973 - DNA, 506 bp, Homo sapiens
acatcttccaacagtgtgaggctcctatggaaggtttccagctttgaagcaatactctgctttcacgttcctgtgtcagaccaggctacccagtcgagtcctcttgtggagcccacagtcctcatggagctaacttctcaaatgttttccataatactgtttgcgctcatttgcttgccttgcgcacctgctctcttacacacatctggaaaacctccggctctctgtggtggaatacccttctaataaaagggtaaccagaacggcccactctcttttacggaaaaatccctaggctttggagatccgcacttacattagagttatgggaatatacacatattaatgtggctccctttttcttgtgggggaataaaagaggactcctcctcattccctttaacatgggggaaaaactgacattaaaagatgagactaaatctttatcttgaattttacacaactacttacgacaagggagatgtttagacctgttgtgtaatact

SEQ ID NO: 1974 - DNA, 346 bp, Homo sapiens
acacagtcgtgtccgcggcggtcaaatacgtcattgtcagggagatctgggtcttggacgtgtcgactgatatggtgactcgactcttgagggacgggttgtagttggtgctccacgatgattgatttccccaatccactccagtcccttccctggggactgccggatccaggcccaccaataattactgaaggacccaccagagacaccgcaggtgagagacagggtctccgaaggcttcaacagtcctgcgccccactgttgcagttacacctgggacaggacccatctgggagctgccaccaggaggaggaagaaccacaggtgtttcatgttcttgtgcagg

SEQ ID NO: 1975 - DNA, 285 bp, Homo sapiens
  misc_feature 86, 87: n = A,T,C or G
acaatttgtggatgtcattgaatctagaggactttcccctttttatatttgtattaactttaacttattaaaaaaaaaaaagaaanngaacaaacaatttaaaaaaaaaaaaaagcaaccaaccccaacaacaaaaaagaatgttttggtattggagaagggatggtcagttagcctgtctgtcacacgacggaatggatactgggcccggggaccactttcatactcacgtcttcatccttggatacccaggggagggcgaaccgttttcgctcgtgtgtctgt

SEQ ID NO: 1976 - DNA, 362 bp, Homo sapiens
acgaagggctgaggcaaaactgttttttaagttggtagatatgctcatgagcaaaggttccctgcatgtaatcatagccattccagctgtcaagttacgcatcatgtgatgagctgctattcgcattcgagattcctccgaatccagggcaaaatccttcctgactatttgctcacaaatagtcatggcaatcttaattgatcgatccaccacaggatggaccagctcctggacagcccgttcaattgcctgacgcacacactgcttcaactgtggatgggcctgaaacaagggaattgttggatttagagtaatgtgtggtgccaagcccgcaagggaatagacattgatgtcgtggtagc

SEQ ID NO: 1977 - DNA, 105 bp, Homo sapiens
  misc_feature 13, 14, 36, 37, 39, 54, 73, 95, 96: n = A,T,C or G
acaagctttttcnncttttttttttttttttttcgnngntttgtttttcctgtntaaaaaaggaccccaaatntaaaggtagggaaagggacaannagggaacat

SEQ ID NO: 1978 - DNA, 257 bp, Homo sapiens; identical to SEQ ID NO: 1118

SEQ ID NO: 1979 - DNA, 383 bp, Homo sapiens
  misc_feature 16, 17: n = A,T,C or G
actacaagaacatcgnnctgggcttcaagacacccaaggaggtgcggggaacctcagaagaaagaaggggaacctggcgttcctgcacgtgtgcccacgacgagttgccctgcctgcatctaagtggcttctggggctgctgggaattgtagttgcttccctgaggccacgcccctggctcttttaaggaaccgcccgcccaaggctcactcctttatctttcctatcctttcaggctattgagggcacctacattgacaagaaatgccccttcactggtaatgtgtccattcgagggcggatcctctctggcgtggtgaccaagatgaagatgcagaggaccattgtcatccgccgagactatctgcactacatccgcaagt

SEQ ID NO: 1980 - DNA, 125 bp, Homo sapiens
acaactaccgccatggtggccgccaggggcagataatctataactggcagggtgcccagtctacccaggatgaggtcgctgcatctgccatcctgactgctcagctggatgaggagctgggaggt

SEQ ID NO: 1981 - DNA, 233 bp, Homo sapiens
acatgacaaggtgcggctccctaggcccctcccctcttcaaggggtctacatggcaactgtgaggaggggagattcagtgtggtgggggactgagtgtggcagggactccccagcagtgagggtctctctcttcctcttgtgctcttgctggggctggtggtccaggggtcttactccttggaggccatgtgggccatgaggtccaccaccctgttgctgtagccaaattcgt

SEQ ID NO: 1982 - DNA, 292 bp, Homo sapiens
actctttagcattaaattacatcgtgcatatacaactacacccatttagatttgccttggaatataatttcaaggccttaaatattaaaaataattttataactatttcatagtttaattggctcttaaatagttttgctagggaggaaacattttgtgttctttaagaaattgatatgtgtaaatgtgttcacttaaatcttgagaaaacctaaggatgaagtctgttgttttgtttttcctaaaaaaggaaaaaagaacctacttttataagccttctctgtttagaagt

SEQ ID NO: 1983 - DNA, 375 bp, Homo sapiens
acaggtatgggacgggaaagccagaggtaggaaggctcagaaggagacagatggctctaaaagagttttccagtgtgtattctgaggaatactagtgttctggagatgttacttagtgtttcaagaaaaggagaattttggctgggcgcggtgactcacgcctgtaatcccagcacttttggaggctgaggtgggtggatcacttgaggtcaggagttcgagaccagcccagccaacatggtgaaatcctgtaactaaaaatagaaaatttagctgggtgtggtggtgtgtgcctataatttcagctacttgggaggatgacacatgagacttgcttgggcccagaaggcagaggttttagtgagttgagatggt

SEQ ID NO: 1984 - DNA, 234 bp, Homo sapiens
acttttcacacaaacagaattttagaaaagcttaaggtcagggagtgctagagagtttctgtatggcaggcaagaattcttccttttgaacaagaccgaaaaacctcaggacaaagagaaagtatatcttttaaaaactgatttcatagtaatgtttctacatattttgaagcacctttatgtatttagagcatatcaaattaattcatttctttccctgttaataaaaaaagt

SEQ ID NO: 1985 - DNA, 444 bp, Homo sapiens
acatgtgaagattttttggcagcttagcgtggaaaccattgatcaccctgctctcatttctacctgttctgtgttggcaagggagagtgcccaaatgagcaagatatcgcagcaaaacagcactccaggggtgaacggaattagtgttatccatacccaggcacatgccagcggcttacagcaggttcctcagctggtgcctgctggccctgggggaggaggcaaagctgtggctcccagcaagcagagcaaaaagagttcgcccatggatcgaaacagtgacgagtatcggcaacgccgagagaggaacaacatggctgtgaaaaagagccggttgaaaagcaagcagaaagcacaagacacactgcagagagtcaatcagctcaaagaagagaatgaacggttggaagcaaaaatcaaattgctgaccaaggaattaagtgt

SEQ ID NO: 1986 - DNA, 264 bp, Homo sapiens
aggtgattccctcgcctttcaagcacgcggacatcgtcaccaccactactcacaagactcttcgaggggccaggtcagggctcatcttctaccggaaaggggtgaaggctgtggaccccaagactggccgggagatcccttacacatttgaggaccgaatcaactttgccgtgttcccatccctgcaggggggcccccacaatcatgccattgctgcagtagctgtggccctaaagcaggcctgcacccccatgttccgggagt

SEQ ID NO: 1987 - DNA, 242 bp, Homo sapiens
  misc_feature 14, 15: n = A,T,C or G
actcaagggaaagnngctcagtttgccagcataagtgccaaagaccatcgccagcatctgtccttcagggtgctcggacagaattcttaccacagcaaaggcataagatgcttgatacggaaaatcagaaacttaactcttttgttgcagatagtcatcagtggctctgtaaaaacgcagaggaaaagagccagaaggtttctgtttaatgcatcttgccttatctttttttattactgtgt

SEQ ID NO: 1988 - DNA, 282 bp, Homo sapiens
  misc_feature 14, 15: n = A,T,C or G
actggcctcaaaanntcaattggaaaagttccatcttttttcttctagaaaagtttataaaagcctggtattatttcttaaatatttggaataacttcagtgaagccatctgttcctagagttttctttctaagcaagtttttgaatactccactcaggtattgtttgcagttgtgacaaggcacaaccaatctctagtatgaccttgtttccagggcttttactgatggcatgttcaccaacccactggcacttcctaagttctaatcatttctcctttgt

SEQ ID NO: 1989 - DNA, 241 bp, Homo sapiens
acagagatggagaacgaatttgtcctcatcaagaaggatgtggatgaagcttacatgaacaaggtagagctggagtctcgcctggaagggctgaccgacgagatcaacttcctcaggcagctatatgaagaggagatccgggagctgcagtcccagatctcggacacatctgtggtgctgtccatggacaacagccgctccctggacatggacagcatcattgctgaggtcaaggcacagt

SEQ ID NO: 1990 - DNA, 502 bp, Homo sapiens
  misc_feature 365: n = A,T,C or G
acaatgaaattactgcatgcagcagtgtagaaaaattttactttttaaaagaattataaaaccatagctttataaatcagtggaaagtggcttacagagagaactatcagatgtgtttacatcacatcttattcactttttttaacagctctaatgctttggcattgctatgttcatatttatgtattccttatttatagctctgatagctttaattttctaagcagtctgtctatcagatgtgcacatctgctgtgccaggttgaagtatagtggaacccatcagtagtaatgtgtagtagttatgacttgttgacatttccattataaactttaattttgaattgtttatgcattataactgnggatttatattgtattgggctgaaagttgacaggatttcagccaccacttgtgaattttttatttagattcattatgtatatcagaatcttgttttttgaaataagagcatggaaaacatttcttgtaatctactct

SEQ ID NO: 1991 - DNA, 276 bp, Homo sapiens
acatttccccgctgataacagcaccatcttccttcgacccccagaccaagggatcaaagctactgctcaattgagtttgacatcagctaccgacttttaaggaatctagaacaaagttctggagccaggccagaagtggtaaaagattcagttagccccttcctctgtgctgtgctgacagggagggagccagtgactggacaatctatgaccccaagtttgtggaacgtggggcttcagctgagggtggggtagtgtgatttcagcagtgtctgt

SEQ ID NO: 1992 - DNA, 537 bp, Homo sapiens
  misc_feature 383, 465, 516: n = A,T,C or G
acgactatcttcagcttactactctggatacagttagctgccttcgaatagtgctgtccatagctagtggtcttgcacatttgtacatagagatatttgggacccaagggaaaccagccattgcccatcgagatttaaagagcaaaaatattctggttaagaagaatggacagtgttgcatagcagatttgggcctggcagtcatgcattcccagagcaccaatcagcttgatgtggggaacaatccccgtgtgggcaccaagcgctacatggcccccgaagttctagatgaaaccatccaggtggattgtttcgattcttataaaagggtcgatatttgggcctttggacttgttttgtgggaagtggccaggcggatggtnagcaatggtatagtggaggattacaagccaccgttctacgatgtgggttcccaatgacccaagttttgaagatatgaggaangtagtctgtgtggatcaacaaaggccaaacatacccaacagatggttctcngacccgacatttaacctctct

SEQ ID NO: 1993 - DNA, 372 bp, Homo sapiens
  misc_feature 15: n = A,T,C or G
acaaaatgagaccangggaaatataaattagtggggcaggtcgggctccagtgggtggcaaagcagagaacatctatccagttagcctatgaggcttgaccctcagagttgctgtccttgggctggacttgaccacctgtaacttaagataaaacagtcccacccttaaggtcatcaaatgaaagacacaaggacagcatagcagaggcctagctggcttgtcagaaaaatgcacgggagatttcagttggctaaaacctcaatatgagccactgcatggccaggctgtgcaaaggagtggggctccattaatagtgcacggtgtggccccactgaggaggagagagtcctcccgcacacagcactggctgt

SEQ ID NO: 1994 - DNA, 82 bp, Homo sapiens
caggtggccaactcagcttttgtggagcgagtgcggaaacggggcttcgaggtggtatatatgaccgagcccattgacgagt

SEQ ID NO: 1995 - DNA, 300 bp, Homo sapiens
accgcggccgttaaacatgtgtcactgggcaggcggtgcctctaatactggtgatgctagaggtgatgtttttggtaaacaggcggggtaagatttgccgagttccttttactttttttaacctttccttatgagcatgcctgtgttgggttgacagtgagggtaataatgacttgttggttgattgtagatattgggctgttaattgtcagttcagtgttttaatctgacgcaggcttatgcggaggagaatgttttcatgttacttatactaacattagttcttctatagggtgatag

SEQ ID NO: 1996 - DNA, 342 bp, Homo sapiens
ttttaacaggacatcatttaattgcctctagggtcctcctgggagagggactgcggggcctttggcagagctctggctgatggaaccaacagaggtgcccatcagccagtgccaggcaggatggcggccccaatgcttggctgggggcagccagcatttggggctgttgcttaagacaatttctgagactaatgggtaaggaatgttgcctttagatggaggagaggggactacatttagagaggagggaggagaagtggcctgcattgggggagggactctaaggttaggttaggaatgacagggagttggtcaaaaggtccttcatggccaggtgaaggc

SEQ ID NO: 1997 - DNA, 174 bp, Homo sapiens
  misc_feature 8, 10, 11: n = A,T,C or G
tttttttntnntttttgttttgatagttatgtcttttaatatgtattagaagaatacataattagcacacatcaaacctgtgatttcacagatatcactacttgggatgaaaatgatataggataacaatgttagacctcagatcaacctcaagaaaaatactgagtaaatagt

SEQ ID NO: 1998 - DNA, 351 bp, Homo sapiens
acttcatttgcctaatttttgccattctcataatgtggcaattgttcaattttgcatttcttccattttatttttttgcatctctgcttttcttttggttagctttgccagttctgcctattatattaatctcccagaatcagcttttagttttgttaaatctctgacatgtttcgttgattcctgctttcatcttaaacatttcttcgttgttaatttgtgtttgctataaaataagcaacatcttaaatgcttgatttgctttcgatgtttattctgtaataagatatttaaagatataattttttccctaaatgctttattagacttttctcataagttttgactggt

SEQ ID NO: 1999 - DNA, 411 bp, Homo sapiens
  misc_feature 14: n = A,T,C or G
gatcctttaaaganacctaaacatttcatagacttttgcacaatggcagaatgcagttaagtggtttaagtggtgttagctttgagggcaaggcaaagtgaggaagggctggtgcagggaaagcaagaaggctggagggatccagcgtatcttgccagtaaccagtgaggtgtatcagtaaggtgggattatgggggtagatagaaaaggagttgaatcatcagagtaaactgccagttgcaaatttgataggatagttagtgaggattattaacctctgagcagtgatatagcataataaagccccgggcattattattattatttcttttgttacatctattacaagtttagaaaaaacaaagcaattgtcaaaaaaagttagaactattacaacccctgtttcctggt

SEQ ID NO: 2000 - DNA, 107 bp, Homo sapiens
  misc_feature 17: n = A,T,C or G
acgtagtctaggccatntgtgttggagattgagactagtagggctaggcccaccgctgcttcgcaggcggcaaagactagtatggcaataggcacaatattggctaa

SEQ ID NO: 2001 - DNA, 354 bp, Homo sapiens
cttggttgccaaacagatttgcagatcaaggagaacccaggagtttcaaagaagcgctagtaaggtctctgagatccttgcactagctacatcctcagggtaggaggaagatggcttccagaagcatgcggctgctcctattgctgagctgcctggccaaaacaggagtcctgggtgatatcatcatgagacccagctgtgctcctggatggttttaccacaagtccaattgctatggttacttcaggaagctgaggaactggtctgatgccgagctcgagtgtcagtcttacggaaacggagcccacctggcatctatcctgagtttaaaggaagccagcaccatagcagagt

SEQ ID NO: 2002 - DNA, 319 bp, Homo sapiens
cgtgaaacttaacactttataaggtaaaaatgaggtttccaagatttaataatctgatcaagttcttgttatttccaaatagaatggactcggtctgttaagggctaaggagaagaggaagataaggttaaaagttgttaatgaccaaacattctaaaagaaatgcaaaaaaaaagtttattttcaagccttcgaactatttaaggaaagcaaaatcatttcctaaatgcatatcatttgtgagaatttctcattaatatcctgaatcattcattttagctaaggcttcatgttgactcgatatgtcatctaggaaagt

SEQ ID NO: 2003 - DNA, 333 bp, Homo sapiens
  misc_feature 20, 310: n = A,T,C or G
acagattgaaatttagttgnttcattggctgtctgaggaggtgtggacttttatatatagatctacataaaaactgctacatgacaaaaaccacacctaaagaaattttaagaatttggcacagttactcactttgtgtaatctgaaatctagctgctgaatacgctgaagtaaatccttgttcactgaagtctttcaattgagctggttgaatactttgaaaaatgctcagttctaactaatgaaatggatttcccagtaggggtttctgcatatcacctgtatagtagttatatgcatatgtttctgngcatgttctctacacaattgtaa

SEQ ID NO: 2004 - DNA, 423 bp, Homo sapiens
gggagctttgtctataagggtggaaaaatctacaaggttccttccactgaagcagaagccctggcatctagcctaatgggattgtttgaaaaacgtcgcttcaggaaattcctagtgtatgttgccaacttcgatgaaaaagatccaagaacttttgaaggcattgatcctaagaagaccacaatgcgagatgtgtataagaaatttgatttgggtcaagacgttatagattttactggtcatgctcttgcactttacagaactgatgattacttagatcaaccgtgttatgaaaccattaatagaattaaactttacagtgaatctttggcaagatatggcaaaagcccatacctttatccactctatggccttggagaactgccccaaggatttgcaaggctaagtgctatttatggaggt

SEQ ID NO: 2005 - DNA, 251 bp, Homo sapiens
actccttctgtgtatttcaggtcgcaggaattcaaccattccttgatggggtcaagagaggctacaggaatggcgttgatcatggtcactttcttgctgtagtccttgtagacgattaccatatcaaagttcttcaggtgaaactggacccgctcaaagtggatcagctctacctcatccaatgtcaccacaaaaggtggccattccgtagcatttaccagcgcactactagtgggctgaaggaggcaggt

SEQ ID NO: 2006 - DNA, 402 bp, Homo sapiens
  misc_feature 12, 13, 15: n = A,T,C or G
acttatctgctnnancacagtaaaaactgagaatttagcagaattatttggaaatggctggcaaccactaaatattggttaatgaatgaatcagttaatatggaatgatgctgtgttggcacaataaaggagtagctctgaacacagagggactttttcgaaatagtgagatatatgaggactggaataatacaagaagttttcctggaggaaggatatatgggatttggagaggcagaggggagggagggctgggatatgatccctggtgtagacacagcatgagcaaaggcatggaggtggtgtggtagagagttgtcatgtgttccagggacaaggaggagactggcttagctggagtgaatgttggggatagtgaaagtttagatatggaggaagtgt

SEQ ID NO: 2007 - DNA, 441 bp, Homo sapiens
  misc_feature 10, 11, 365: n = A,T,C or G
acgtgtgtannttttgttcagtgacttcttcagtgtctcagccagctgagcaaataaagacactacataggcatagttcatgttcaaagaatgagagtaatataaactaattaatattcacactacctcttctaactggttaagtatcattatctcaatttggcagatagaaaaaagaggtagaaagattaagtgacttgcttacagctacagagagaatatttgtcaccagattatcactccagaaagtctagcactttgttcagacaaacagaccacaccttattaggaagatataaaacgcatgataattacacttgggaaaacaatacaattaaggaatggggaacaaaaaggtagtttanggggatataaaactatgaataagtagcttaaaaattcaatcaataaagttgtgttacaacacctgggggaacagca

SEQ ID NO: 2008 - DNA, 92 bp, Homo sapiens
  misc_feature 2, 21: n = A,T,C or G
cnaggtacaaagacaaagaancaaactacattggcatttaagccaatcaaaaaaggaaagaagagaaatccctggtctgattcagaatcaga

SEQ ID NO: 2009 - DNA, 157 bp, Homo sapiens
  misc_feature 104, 115, 140: n = A,T,C or G
acgtgccaagcatcctcgtgcgaccgcgagagcccggggagcgggggcttgccggccgtcgcactcatttacccggggacagggagaggctcttctgcgtgtantggttgtgcanagcctcatgcatcacggagcatganaagacgttcccctgctg

SEQ ID NO: 2010 - DNA, 183 bp, Homo sapiens
acaaatttggtgacagaaaagacttcagtatatgctggcatcttagaagcagttctcaaagagcttagttttattttcttgaattttaagaatgcctaagatccttcttcatcctcgatcttgggagccaagtagtattttaagtgtcccatatccgcaattttatactctacaacaaggggt

SEQ ID NO: 2011 - DNA, 464 bp, Homo sapiens
actttgtgcaatattttaaacatccatcattctgtcagcaaaatgattgtcacaggaagtatagggcacacgtttctctattcagtgagtgacagtgagctacaaaacactggaaagaactgaaactgaggaaggaacttgtaaaaagaacttcaaaattaccaagaagaaggctgtcccagaagaaatatctctttagtctaatcagactttctgaaacttatgtgtaacttaggctgtagatggatggatttcccatattcataattttacaaataatcactcaatattagattaattaatacagtaacatatttggcaagggcgactcaggaagaaaaatcagttactcattacattctctcagaagcatcttttcgtagcatgatcattttgactaaaaaaaaacagttaactatccacaagcatcataactagcaattaattctacatgaaatatctgt

SEQ ID NO: 2012 - DNA, 354 bp, Homo sapiens
acactatccattagagtggaaaggggccaagaggattaataagtgccaccaagtttctaaaactgcagaatcagaggcattgtgcatgctgacaatggtttaaagggtctctcaattttactttaatcccccatttaacctttgtttctttcaaaaaatcaactgaaagcggttaactgaatataaatctattttacagcatttactacgttaatttaaaaatcaacaagctgtaaaatacttacattattcacacatatatagacggaatcatccagaacataatcaactgccaaccccccttaaaaaaaatcaacaaatcagtttttatttgcatggccaattatcatttgt

SEQ ID NO: 2013 - DNA, 508 bp, Homo sapiens
acccattaaactgctaaaaaacaaattgagtggtgagaatacaacagaagtccaatttagattctgagtgttgtcaccatgtgattacaatcacacagacacttccaagcttatagctggagctcctggaagctatttcatactctggtgcaagggccaaaaaaaacacaacacaagaaggaataagtcctgaattattggcttcatcacatccaccttctccaccccaaaatggcacaaaagaaacagttaccacaccctgcagaccttttggtgtaaaagagatgatgatgaactggggtgggaacaggtcatgaagatctgtctaaaaaagtcccattcaggtgagtttgtacatacatctcctacaataggaagtaatgtagaagagatagtgattaataatacacgtttcctaatgtgggatattggtggccaagaatctcttcgttcttcctggaacacttactatactaacacagagtttgtaatagttgttgtggacagt

SEQ ID NO: 2014 - DNA, 381 bp, Homo sapiens
acaaaccagttttattagggaactgccccaggtgcacctctggttcatgctcttgtcacacctgtttctcagatcagcccaggctcagaggcaagttactagctaagcaaagaggaaaactgttctgcaaaatagcaactgtcagcttaaggcattactaacattgcagaaggaagcaagatttactagggacatctggatagcccaggacaatgacttctgggaacaggaagctccctagggccagatcgtgctgccatccaacttgggagatgacattatcgtgctgggatggtgggtaactccttcaaaccaatccatgtcacagaacactgtctattccttgagcttttggatttagaaattagttatataaaaagt

SEQ ID NO: 2015 - DNA, 329 bp, Homo sapiens; identical to SEQ ID NO: 1146

SEQ ID NO: 2016 - DNA, 391 bp, Homo sapiens
acactttgctgctacaaactacatcttgatgggattaagaggctacattgattcttgggtttattgcaccaacaatccatctctgacctacccatggctgcatctgaaacaaggtaaactccaagaagaaatgaaaacagtgggtccctaaagcactcttcccaacaagcaattcttacatgttttatgtcaaacagtcactgctaaagccactggagctgaagatggcacaatgtggctttctttgctttaccttgtctaaaaagcaaactgtgacctggaatccaaagtctgtattctgattgttgtctcagaatagcaaaatatgttttctccagtttggggagctcatgcttaaacttggaagcagtttcctactggaatattatgt

SEQ ID NO: 2017 - DNA, 476 bp, Homo sapiens
acatctccactgagttcaaccgttatggcatctccaatgagaagcctgaggtcaagattggggtttctgtgaagcagcagtttaccgaggaagaaatatacaaagacagggatagccagatcacagccattgagaagacttttgaggatgcccagaaatcaatctcacagcattacagcaaaccccgagtcacaccggtggaggtcatgcctgtcttcccagactttaagatgtggatcaatccatgtgctcaggtgatctttgactcagacccagcccccaaggacacgagtggtgcagctgcgttggagatgatgtctcaggccatgattaggggcatgatggatgaggaagggaaccagtttgtggcctatttcctgcctgtagaagagacgttgaagaaacgaaagcgggaccaggaggaggagatggactatgcaccagatgatgtgtatgactacaaaattgctcggagt

SEQ ID NO: 2018 - DNA, 265 bp, Homo sapiens
  misc_feature 4, 8: n = A,T,C or G
taanctcntcattctacaagcactgaggatatgaagcttaaaaggtgaaaacttgaatacccttagaaaaggggaacagtctgaggcaaaagttgtaggcctgtaaatatatattttattttattttcatcttttttgagacggagttttgctcttgttgcccaggctggagtgcagtggtgtgatctcggctcactgcaacccccacctcccggcttcaagtgattctcgtgcctcagcctcccgagtagctgggattataggt

SEQ ID NO: 2019 - DNA, 276 bp, Homo sapiens
acattccaatatgtttacagctgcaagataatgaggcacactcagtattgcacttcattaaaatttcaggctcaaacttaacctagaagtttaaatgaaattgcatttgtaatttagtaattcttatacaggacaaacattgatatgtttatatacagtgtgatacttattacatttatatgctgtcctaacacaatgttttttttttttttaaataacagtctaggaaataaaccagaatattcctctttttatccccacccgtgatgcaattgt

SEQ ID NO: 2020 - DNA, 406 bp, Homo sapiens
accagtgctggctgcaggtattaagtccaagtttattaactagatatttatttagtattgagagtaatttgtgaatttgttttgtatttataaaatttatacctgaaaaatgttccttaatgttttaaaccttttactgtgtttttattcctctaacttccttaatgatcaatcaaaaaaagtaacaccctccctttcctgacagttctttcagctttacagaactgtattataagtttctatgtataactttttaactgtacaggaccacgttccagtcctcctgggtcaggatctggaacacggtgacgatggcccacagcagggagtcgaagttcttcctgtcaggcacggtgtctccggtgtctgtcttcaggctgaacttgcagccgaaaaggtgcatgcc

SEQ ID NO: 2021 - DNA, 529 bp, Homo sapiens
actattctgtgtcattcagtaaagaggcgaagtattatcagctgagatgttccggtcctggtctgcccctctatactctacacagcagcgtgaatgataaagggctgagagtcctggaagacaattcagctttggataaaatgctgcagaatgtccagatgccctccaaaaaactggacttcattattttgaatgaaacaaattttggtatcagatgatcttgcctcctcattttgataaatccaagagatatcctctactattagatgtgtatgcaggcccatgtagtcaaaaagcagacactgtcttcagactgaactgggccacttaccttgcaagcacagaaaacattatagtagctagctttgatggcagaggaagtggttaccaaggagataagatcatgcatgcaatcaacagaagactgggaacatttgaagttgaagatcaaattgaagcagccagacaattttcaaaaatgggatttgtggacaacaaacgaattgcaatttggggctggtcatatgga

SEQ ID NO: 2022 - DNA, 317 bp, Homo sapiens
  misc_feature 120, 228: n = A,T,C or G
cttttttttttttttttttttttttttggaaagttgaatattttattatttacacatataaagtgagaatgaaaattgggcatggggcaagggcaggaagatgactccagctcagtcggngatgatgagctcgtccaccccccagtcttcatagctcccatctggcaggtaacggcgaatgatgatggggatctttcgggccttgagttccttcatggcaatgagcanaggatctgtctccccctccagctccaccatcacaggggcacacatcgcaatctggagcgctcgggtgcccagcacgcgggctcgctcgt

SEQ ID NO: 2023 - DNA, 218 bp, Homo sapiens
acctaagcagtaagcgtatttaggttaatgcagtttcacttatgttaaatgttgctcttataccacaaatacattgaaaacttcggatgcatgttgagaaacatgcctttctgtaaaactcaaatataggagctgtgtctacgattcaaagtgaaaacatttggcatgtttgttaattctagctttttggtttaatatcctgtaaggcacgtgagtgt

SEQ ID NO: 2024 - DNA, 543 bp, Homo sapiens
acatggctgagcatgcactatttatagttacaaagatacctgccaatttattacaatagaattacacagtgcctgaaaatggtgaaacatctcacacatcatttaaatcaatataatttcaagcaggaaacgttccttatttgaccacaattgcaataattacatgaaaattcttataaaaacatgaatctccttcaagaaattgatgcatattctacgcactacaggttaaggcagtaaaaaaatgtattcctgataactggaggtgttgacaatgtcaattaaagctgtctgactctagtttttcattctccatcatataccaaaagtttgtgaatgatttcatttttaaagtcaacaaagtattagtaactaagaagagttgaagctggaaaaaagtaattgctagggaagggaaaaatgtaaattggattttgcctgaaagttttcaaatcataaacaatagcattatttatgagtctaagccttaaatgtataaaacaaatacatatagttcacttttcttaatttaaaatatactgt

SEQ ID NO: 2025 - DNA, 506 bp, Homo sapiens
  misc_feature 4: n = A,T,C or G
tacnactcctatagggcgaattgggccctctagatgcatgctcgagcggccgcccgggcaggtacactgtcttaatatgaatgggactgcttttctacttgagccatttttaaccaaagcaaaataacctaagtaatacaaagtgttaaaatacagcataaagatacaaaaacagacatactaattctagttaggaatgtaattatgatgttacattttttataatccacaattatgtttagggaatcacacaaacatagatcactgatttgaatgaaatgcataaatttgtagcaaagctttgtagttacaaaaaacaaaaaaattaccaaagaatgcacaaaattaatgtttattccacctttgtgtcatattcctggatccttcaccaatgttacatgaggaaaaaaacaaaagcaaaacaaatgaaaaactgaaatcagaatcactaatattatcaaatagggaaacaaataaattaaaatctagcagccatcagcaagagt

SEQ ID NO: 2026 - DNA, 510 bp, Homo sapiens
  misc_feature 493: n = A,T,C or G
ttttttttaaggggctgtaattatatttattagattaacaaggcagatgtgaattttctcttctataatccagtaagtctgtgtattcgttgactcagacagacaagaagccacaaggaaacaaagaagtaatcatttgttgagagacgttattaactatgatcttccctgaagctaccgggatgggaaaggtcagtgtcttcctttgaaccctgagacaattaggggctcttgaggcctgctgtgcccctgctgccaaggcagcctcaagttcaaggagcagctaatcacccactcctgcattcagcctgtcttgcctgatgagggctacgcaggctgcctcccattggtgtgcactgtttcctttttcagctgctaaatgggctgaacaccatcggcctggggtatccctttttggggaatacatctgtctgtccgaactcctttcccttcaaatggcactgtgataaaatctggtcataccatgctccancactggaagtacctcgg

SEQ ID NO: 2027 - DNA, 306 bp, Homo sapiens
actcaaaatacagtcaccactgcaaaagagatacctgtgcattactctttttttcccctctggctttcagcacggccttctgaggctttaacaagaggtaataaggacttagcaagcagttctcctaaccaatacattaattcacttgaaagtcatacttttaaaaaaatcagtagtgtatatgttgaggaaaaaaagcatgttcactctggaacaaagttggccctctatggctctcagatgcctaatgctctacagttttgtgagagaattgttaactgtaaagctgtaaaggcggttattggt

SEQ ID NO: 2028 - DNA, 484 bp, Homo sapiens
  misc_feature 151, 247, 328, 394: n = A,T,C or G
gctctcttaggaatacagtttctagcattaaacaaataaacaaggggagaaaataaaactcaaggagtgaaaatcaggaggtgtaataaaatgttcctcacattcccccccgctttttttttttttttttgactttgccttggagagccanagcttccgcattttctttactattctttttaaaaaaagtttcactgtgtagagaacatatatgcataaacataggtcaattatatgtctccattanaaaaataataattggaaaacatgttctagaactagttacaaaaataatttaaggtgaaatctctaatatttataaaagtancaaaataaatgcataattaaaatatatttggacataacagacttggaagcagatgatacagacttntttttttcataatcaggttagtgtaagaaattgccatttgaaacaatccattttgtaactgaaccttatgaaatatatgtatttcatggt

SEQ ID NO: 2029 - DNA, 476 bp, Homo sapiens
gcccagcagccaccacagcgcctgcttcctcggccctgaaatcatgcccctaggtctcctgtggctgggcctagccctgttgggggctctgcatgcccaggcccaggactccacctcagacctgatcccagccccacctctgagcaaggtccctctgcagcagaacttccaggacaaccaattccaggggaagtggtatgtggtaggcctggcagggaatgcaattctcagagaagacaaagacccgcaaaagatgtatgccaccatctatgagctgaaagaagacaagagctacaatgtcacctccgtcctgtttaggaaaaagaagtgtgactactggatcaggacttttgttccaggttgccagcccggcgagttcacgctgggcaacattaagagttaccctggattaacgagttacctcgtccgagtggtgagcaccaactacaaccagcatgctatggtgttcttcaaga

SEQ ID NO: 2030 - DNA, 467 bp, Homo sapiens
acttcttttgctaccaaatttttaagaaaagggagaaatccctcataactaaaatcctaaaaaatgataagtgcttcaaggagattaaagtgtcaggtattacaaaagggagagaaaagaaaggaggaagagatagtatgaattcccaggctccctgtggaaaatgaaaaccagttgttttgtagcagcaatgcctaggctgtcgtattttaaaatctgctgttgggtctgcatgtgtctgagagggcaggttttgatatttgttgaaatgacaggactacgaaaggccttaaacctcgaccttgacgaaaaaaaagacaatttgtgaccttgacttttgacagctcatgaattggccttagctggattagtagatcaagggcgccacctcgcgttgacaagcctccttgtaattcttcaaccaagggaatcaagagctcttacctccttgactttagagattcagt

SEQ ID NO: 2031 - DNA, 257 bp, Homo sapiens
actatagggtaaatacgggccctatttcaaagatttttaggggaattaattctaggacgatgggcatgaaactgtggtttgctccacagatttcagagcattgaccgtagtatacccccggtcgcgtagcggtgaaagtggtttggtttagacgtccgggaattgcatctgtttttaagcctaatgtggggacagctcatgagtgcaagacgtcttgtgatgtaattattatacgaatgggggcttcaatcgggagt

SEQ ID NO: 2032 - DNA, 115 bp, Homo sapiens
cagcttcactccatcaaacacggctgggagttcgggagtctccagcatggcattcatcttgatcaatgttacttattcttcccactgcaaatacgaattttccttgaagagttgt

SEQ ID NO: 2033 - DNA, 374 bp, Homo sapiens
acaaacatgctcagaacttgctgggacagtgtgggtgggagaccagggctttgcaattcgtggcatcctttaggataagagggctgctattagattgtgggtaagtagatcttttgccttgcaaattgctgcctgggtgaatgctgcttgttctctcacccctaaccctagtagttcctccactaactttctcactaagtgagaatgagaactgctgtgatagggagagtgaaggagggatatgtggtagagcacttgatttcagttgaatgcctgctggtagcttttccattctgtggagctgccgttcctaataattccaggtttggtagcgtggaggagaactttgatggaaagagaaccttcccttctgt

SEQ ID NO: 2034 - DNA, 265 bp, Homo sapiens
  misc_feature 15, 16: n = A,T,C or G
acttctatttcctcnnggatgagaaagatagtcaaggagaaaacatgtttctgcgctgcgtgagtgagcttgtgattgaaagccgagagttcgatatgattcttgggaaactagagaatgacggaagtagaaagcctggagtcatagataagtttactagtgacacaaagcctattatcaacaaagttgcttctgtggcagaaaataaaggactgtttgaagaggcagcaaagctgtatgaccttgccaagaatgctgacaaggt

SEQ ID NO: 2035 - DNA, 259 bp, Homo sapiens
  misc_feature 15, 16, 17, 168, 190, 212, 238: n = A,T,C or G
accaaatctttgggnnncattggcaaataatttcagtgtggtgtattattaaatagaaaaaaaaaaattttgtttcctaggttgaaggtctaattgatacgtttgacttatggtgaccatttatgcactttcaaatgaatttgctttcaaaataaatgaagagcagcntgtccttctttcctcttttaantgttcagctgtggcatgctcanaggttcctgctggattccagctggancggtgtgatacccttcttttt

SEQ ID NO: 2036 - DNA, 264 bp, Homo sapiens
actcccggaacatgggggtgcaggcctgctttagggccacagctactgcagcaatggcatgattgtgggggcccccctgcagggatgggaacacggcaaagttgattcggtcctcaaatgtgtaagggatctcccggccagtcttggggtccacagccttcacccctttccggtagaagatgagccctgacctggcccctcgaagagtcttgtgagtagtggtggtgacgatgtccgcgtgcttgaaaggcgagggaatcacct

SEQ ID NO: 2037 - DNA, 161 bp, Homo sapiens
actttggcctctctgggatagaagttattcagcaggcacacaacagaggcagttccagatttcaactgctcatcagatggcgggaagatgaagacagatggtgcagccacagttcgtttgatctccaccttggtcccttggccgaacgtccacggaggggt

SEQ ID NO: 2038 - DNA, 224 bp, Homo sapiens
  misc_feature 11, 44, 45, 46, 105, 178, 179, 192: n = A,T,C or G
ctcctgattcntggtgctgctgtctctgtccttctacaggaggnnntaccgctttgcctactacaagctgcttaagaaggcagatgaggggttagcatcgctgantgaggacggaagatcacccatctccatccgccagatggcctatgtttctggtctctccttcggtatcatcagnngtgtcttctctgntatcaatattttggctgatgcacttgggccag

SEQ ID NO: 2039 - DNA, 463 bp, Homo sapiens
  misc_feature 403, 432: n = A,T,C or G
actttggcctctctgggatagaagttattcagcaggcacacaacagaggcagttccagatttcaactgctcatcagatggcgggaagatgaagacagatggtgcagccacagttcgtttgatttccaccttggtcccttggccgaacgtccagggactactgtaactctgttgacagtagtaagttgcataatcttcaggttgcagactggtgattatgagagtgaaatatgtcccagatccactgccactgaaccttgatgggacccctctttgcaaactggatgcaccatagatcaggagcttaggggctttccctgctttctgctgataccaatttaaataggtgctaatgctctgacttgcccggcaagtgatggtgactctgtctcctacagatgcanacagggaggatggagactgggtcatctgnatgtcacatctggcacctcggagccagagta

SEQ ID NO: 2040 - DNA, 558 bp, Homo sapiens
  misc_feature 8, 9, 14, 354, 527: n = A,T,C or G
ctttgggnnctagnttaattttttttttgcaacatatcccactcagaaacattcaggtttgaagccagccctgataatgaaggatgaactagtgtgatttctaatcctcccttttttgatttagttggatgtgcttttaaatgtcctttgcctgcatgaggtggaaaggggacctttttgagttgtcattttgcactttcaaaacttattttcttggaaaacaatatttatagggcttaaagcccattttcatttctaatctaaattatgtgtgcctatctgaaaactttgggctctttcttgtttctttcccaaaattcagaagttaatgggcttttatgtttttctatattntttttatttcaatgatttggcctgtctatgttaggctaaaaaataaccttgtgtatgctaccaacttaaagtgcattattttgtgtcactttttttttcttgtaaaaatgacttggattgaaaatatgtggtagcctttttatttctacattaagttctacctaggatatttncaaggactgccacaaaacccatatgtgcagt

SEQ ID NO: 2041 - DNA, 276 bp, Homo sapiens
  misc_feature 109, 110: n = A,T,C or G
acacaggaggcaaagtgtttcacatcatagacttcacttccaactccttggaatgttcatttctttggcttacaggagagactagacaggaaggccaggcaatgcttanncaactaaaatgaggttgggggtaatgctaacgtcaccctcacagggatggccacggggactgttattcgcaagctggttttctagacctgttagctggaagcatggtgagcaccatttctggacgctcaggccgtgtcgggcttcagtcatctccaccacacaggt

SEQ ID NO: 2042 - DNA, 241 bp, Homo sapiens
ccgcgccgccacaatggtgcgcatgaatgtcctggcagatgctctcaagagtatcaacaatgccgaaaagagaggcaaacgccaggtgcttattaggccgtgctccaaagtcatcgtccggtttctcactgtgatgatgaagcatgtgtggggtgatcagccccagatttgacgtgcaactcaaagacctggaaaaatggcagaataatctgcttccatcccgccagtttggtttcattgt

SEQ ID NO: 2043 - DNA, 539 bp, Homo sapiens
actattctgtgtcattcagtaaagaggcgaagtattatcagctgagatgttccggtcctggtctgcccctctatactctacacagcagcgtgaatgataaagggctgagagtcctggaagacaattcagctttggataaaatgctgcagaatgtccagatgccctccaaaaaactggacttcattattttgaatgaaacaaattttggtatcagatgatcttgcctcctcattttgataaatccaagagatatcctctactattagatgtgtatgcaggcccatgtagtcaaaaagcagacactgtcttcagactgaactgggccacttaccttgcaagcacagaaaacattatagtagctagctttgatggcagaggaagtggttaccaaggagataagatcatgcatgcaatcaacagaagactgggaacatttgaagttgaagatcaaattgaagcagccagacaattttcaaaaatgggatttgtggacaacaaaacgaattgcaatttggggctggtcatatggagggtacctg

SEQ ID NO: 2044 - DNA, 486 bp, Homo sapiens
acactcccagggaagtcagagtaagcctgtttccaccgcagcacagcagtgagcacagctaggcagaattccaacagagcgcaaatcagcatcagagagagagttccagccagactggcttttggctgtatagcagtccgtggtataaagtgaatcatgataaaagtaagaaacataacttcttgttggtatattatttttgtccaactcacactgcagtgaggcaggatttaaggtggcctgtttgacagacaggataatgaaacccaccagggcagacagagcactcagaatgcttccaaccaggctgctatgcaccaaaagcttggttaaccttttctctgtggcgattgatagagagccagagatgataaaaaaaaagggtcctatgaatgggtaagcagagttcaacagtgtagaagtcacttgggtaaaatttggagagaaggaagcagatgccaaaatgatccccaagctcaataccat

SEQ ID NO: 2045 - DNA, 420 bp, Homo sapiens; identical to SEQ ID NO: 1848

SEQ ID NO: 2046 - DNA, 291 bp, Homo sapiens
acatttgttcggcgcaggtgccactgaccacaaagtcatcagtcaccatggggcagccgatgaggtctagagagcaaatgaagggcttaaaggtcttcgggtccaacccggcaatgactggctcagtgtagtaagggccaaaccgtttctcatacaagaggttggccaccatgctcatgagggtataaggtttgatctgccgaccttccttcaactcatacaggttcagccggaacttgaggcgctgggcaactgtctggacgtcagtggcgagcccggccagaccgatgt

SEQ ID NO: 2047 - DNA, 309 bp, Homo sapiens
cccgatccgccagcaccacctgaggatccagaaaccgccccagcgatggaagaggatcaggagctggagagaaaaatatctggattgaagacctcaatggctgaaggcgagaggaagacagccctggaaatggtccaggcagctggaacagatagacactgtgtgacatttgtattgcacgaggaagaccataccctaggaaattctctacgttacatgatcatgaagaacccggaagtggaattttgtggttacactacgacccatccttcagagagcaaaattaatttacgcattcagactcgaggt

SEQ ID NO: 2048 - DNA, 555 bp, Homo sapiens
acattcttctcagcaccttagagcccactgatgcaggcatactgggaacgactaaggactcacccaagctgggtctgctcatggtgcttcttagcatcatcttcatgaatggaaatcggtccagtgaggctgtcatctgggaggtgctgcgcaagttggggctgcgccctgggtatgattgggctctctcagcgcttgctgtccgtgttgtcctttggcaagagaggacggtcctaggattgcatcagtctggtggtctggtggagcgggtggggtgctggactgggtagagggcccagggttctgacctgggtggatgatgggcgaatggtcctgaactctctgctccctctctcagtgtctcttgggcttctatggagcttccctcttgtgctggaaacctcttttccatcttggaaatgcctctgcccacatctgggaagtgccatagccttgagtgaatttatttgtttatttatttttctttttcttctctcaggatacatcattcactctttggggacgtgaagaagctcatcactgatgagtttgtga

SEQ ID NO: 2049 - DNA, 279 bp, Homo sapiens
acacgacaaagtcttcatttcaaaccattcactcagtttccatggtaacattgcgggcttccttggctaccataagtcgcattagttgactgtggaatttctcaatcttctttacatcttgagcttggtctgttttatacaccaaacaaactaaatcatctgttactttaacacacaagttcccatcagaatgcctatatttgagaaccacacgtgccttcatagggtcagcgaggtaaagcttctcggcagcgcggctgagctcctcccaggtctggt

SEQ ID NO: 2050 - DNA, 356 bp, Homo sapiens
  misc_feature 116, 160, 161, 205, 206: n = A,T,C or G
acggtagaactgctattattcatcctatgtgggtaattgaggagtatgctaagattttgcgtagctgggtttggtttaatccacctcaactgcctgctatgatggataagattganagagtgaggagaaggcttacgtttagtgagggagagatttggtnnatgattgagatgggggctagtttttgtcatgtgagaagaagcannccggatgtcagaggggtgccttgggtaacctctgggactcagaagtgaaagggggctattcctagttttattgctatagccattatgattattaatgatgagtattgattggtagtattggttatggttcattgtccggagagtatattg

SEQ ID NO: 2051 - DNA, 101 bp, Homo sapiens
  misc_feature 56, 57, 62, 95: n = A,T,C or G
acctgataaaactttaaccagggaagcattaaacacagtgcagcagcttttgcccnngcttntaagttcctgccggcagcatttatcaatgtaanaactaa

SEQ ID NO: 2052 - DNA, 207 bp, Homo sapiens; identical to SEQ ID NO: 1896

SEQ ID NO: 2053 - DNA, 216 bp, Homo sapiens
  misc_feature 109: n = A,T,C or G
acttctcagaacgtggggatgctgtggccaaggcctccaaggagactcatgtaatggattaccgggccttggtgcatgagcgagatgaggcagcctatggggagctcanggccatggtgctggacctgagggccttctatgctgagctttatcatatcatcagcagcaacctggagaaaattgtcaacccaaagggtgaagaaaagccatctatgt

SEQ ID NO: 2054 - DNA, 373 bp, Homo sapiens
cgcagagggacaaaaatcaaccggaattgaaaactactcaacggccgcagaacggggtcgatccactgccgctggctgccggctgccggcggggagcgagggtggcggtgtcgggtccgggcagcgggaaggcctcggtctcttggttccttcttggagctgctgcggggccgcgggcgggcgggtcggtctcggctgcttcaccgggttattttataaaagaggaagaaaaaaaataaaagtctccggcgggggagacgcggattttttgtaaatttttttggggttttttaaaagatttttttagattttttttggattttttaataataaatgtgtgttccgagcccggagcacacactccgcactctcg

SEQ ID NO: 2055 - DNA, 241 bp, Homo sapiens
acctgcaagaaacctactcaaagcaggtcaccagccaggagccctgacccaggctgcccagcctgtccttgtgtcgtctttttaatttttccttagatggtctgtcctttttgtgatttctgtataggactctttatcttgagctgtggtatttttgttttgtttttgtcttttaaattaagcctcggttgagcccttgtatattaaataaatgcatttttgtccttttttaaaaaaaaaa

SEQ ID NO: 2056 - DNA, 596 bp, Homo sapiens
  misc_feature 492: n = A,T,C or G
cttttctgtattttactatgagattcttaataacccagagcttgcctgcacgctggctaaaacggcttttgatgaggccattgctgaacttgatacactgaatgaagactcatacaaagacagcaccctcatcatgcagttgcttagagacaacctaacactttggacatcagacagtgcaggagaagaatgtgatgcggcagaaggggctgaaaactaaatccatacagggtgtcatccttctttccttcaagaaacctttttacacatctccattccttattccacttggatttcctatagcaaagaaacccattcatgtgtatggaatcaactgtttatagtcttttcacactgcagctttgggaaaacttcattccttgatttgtgtttgtcttggccttcctggtgtgcagtacctgcccgggcggccgcccgggcaggtacttgtgccaggaatataaatcaacacattgcttcctttatcaaagnaagtcttgttatttaaaaaaagtcaactgagccagtatgattagtgatgtaattgattttcattctggcacaagcctctttcattctggacagctcacaaatag

SEQ ID NO: 2057 - DNA, 523 bp, Homo sapiens
actttgcctacggcagcaacctgctgacagagaggatccacctccgaaacccctcggcggcgttcttctgtgtggcccgcctgcaggattttaagcttgactttggcaattcccaaggcaaaacaagtcaaacttggcatggagggatagccaccatttttcagagtcctggcgatgaagtgtggggagtagtatggaaaatgaacaaaagcaatttaaattctctggatgagcaagaaggggttaaaagtggaatgtatgttgtaatagaagttaaagttgcaactcaagaaggaaaagaaataacctgtcgaagttatctgatgacaaattacgaaagtgctcccccatccccacagtataaaaagattatttgcatgggtgcaaaagaaaatggtttgccgctggagtatcaagagaagttaaaagcaatagaaccaaatgactatacaggaaaggtctcagaagaaattgaagacatcatcaaaaagggggaaacacaaactctttagaacataacaga

SEQ ID NO: 2058 - DNA, 183 bp, Homo sapiens
  misc_feature 12, 46, 47, 56, 156, 160, 168: n = A,T,C or G
acatacgtgaanagttaccaccagtcctgccacctttggacagctnnaacaccatncccagcatccagtcagacctagtaaagaaaaccttggattcttaacccaagataggctgtaaatcactagctttttttcctcatgaaaaaaaatagagtnaaanaatatttnctctcttttctatat

SEQ ID NO: 2059 - DNA, 315 bp, Homo sapiens
accaatttttagaaacatattgtcttctcagattgaagtggagggtccagaaatgcaacacccagcattctttaaagaaaataatagctagaatctttctgatacagattccaatatagattccattattcaaagtcctccacaaattactgggaaaatgtaagaggtaacttcacaaaaatcacatattgagtggaataattataactgatatataaataaggatttactaaaaaaaagcctcaaggggtgatattttaaatcaaggttttaaatacaaaaggtgtcttgtgttgcttaatcatacagtttcgt

SEQ ID NO: 2060 - DNA, 218 bp, Homo sapiens
  misc_feature 98, 153, 161, 162, 183: n = A,T,C or G
acttgaatggaaggcggatgaacaccttgcaggccatctggatgatggaccccaaggatgtccgtgagtggcaacatgaggagttctaccgctacgtngcgcaggctcacgacaagccccgctacaccctgcactataagacggacgcaccgntcaacatnngcagcatcttctacgtgcccnacatgaaaccgtccatgtttgatgtgagccgggag

SEQ ID NO: 2061 - DNA, 284 bp, Homo sapiens
acatgtatttaacattttaccagtttctgcttctaaatttaatatagtaattccaaccaaaaaaatagtatctctgtaacattttatctatgtccactgcaagctgcagagtctctgttgccaagatttcttgacacatttaatgttttacctaaaattgtggtcagattgagcaatatcattatcctaaattatgtttaaattatctaaaaatatccaaagcagttttcttggaagaaaaaaaatattactcaaatccaaagcattatcacacatatccttgt

SEQ ID NO: 2062 - DNA, 308 bp, Homo sapiens
acaggtctctgtaaaaagtccttgctgtctcagcagccaatcaacttatagtttatttttttctgggtttttgttttgttttgttttctttctaatcgaggtgtgaaaaagttctaggttcagttgaagttctgatgaagaaacacaattgagattttttcagtgataaaatctgcatatttgtatttcaacaatgtagctaaaacttgatgtaaattcctcctttttttccttttttggcttaatgaatatcatttattcagtatgaaatctttatactatatgttccacgtgttaagaataaatgt

SEQ ID NO: 2063 - DNA, 172 bp, Homo sapiens
  misc_feature 129: n = A,T,C or G
aagtgtgactactggatcaggacttttgttccaggttgccagcccggcgagttcacgctgggcaacattaagagttaccctggattaacgagttacctcgtccgagtggtgagcaccaactacaaccancatgctatggtgttcttcaagaaagtttctcaaaacagggagt

SEQ ID NO: 2064 - DNA, 240 bp, Homo sapiens
acagagtgaggctgagtctacaccttcagtcttcatcatcaggagggatacctaattcttcatctgtccactgggaaggatcaggatacggaaagtgacccagcacctcttctgagtcatgccaaaagcgccagagaatccagaaccacatgagtccgctgaagaactcgctctggaacacctgggatctggtcagctgggggaactgtctataccggggctcaatgtgcacaccaccac

SEQ ID NO: 2065 - DNA, 375 bp, Homo sapiens; identical to SEQ ID NO: 1222

SEQ ID NO: 2066 - DNA, 297 bp, Homo sapiens
  misc_feature 140, 268: n = A,T,C or G
acaaattctgagctgtctaacccctctgaaacggaatctgagcgtaaagacgagctgagtgattgatcattggcaggagaagatgatcgagacagccgacatcagcgtgacagcaggagacgcccaggaggaagaggcanaagtgtttcagggggtcgaggtcgtggtggaccacgtggtggcaaatcctccatcagttctgtgctcaaagatccagacagcaatccatacagcttacttgataatacagaatcagatcagactgcanacactgatgccagcgaatctcatcacagt

SEQ ID NO: 2067 - DNA, 240 bp, Homo sapiens
aaacttgtgagcttactgcagtcagtcacagaggctgttctttttcacacaccccttcatgcccggctttccccatatccacatgcagagggcgagctcataaaactacagggaagcgtgaaatgatggctttggtagctgtttactgggtaaccccactgtgacactgtccttttcatgtgatgtggaaacctacttctgtcctccaaaccatgaaatgtgtcatctagactgcagagt

SEQ ID NO: 2068 - DNA, 419 bp, Homo sapiens
  misc_feature 141: n = A,T,C or G
actggccttggtaaaggaatgacaactcttctgtccagcctaggtgctcagtgcgtgatagccagccggaagatggatgttttgaaagctaccgcagaacaaatttcttctcaaactggaaataaggttcatgcaattcantgtgatgtgagggatcctgatatggttcaaaacactgtgtcagaactgatcaaagttgcaggacatcctaatattgtgataaacaatgcagcagggaattttatttctcctactgaaagactttctcctaatgcttggaaaaccataactgacatagttctaaatggcacagccttcgtgacactagaaattggaaaacaactaattaaagcacagaaaggagcagcatttctttctattactactatctatgctgagactggttcaggttttgtagt

SEQ ID NO: 2069 - DNA, 259 bp, Homo sapiens
acgtgggtgaggggatggaggaaggcgagttttcagaggcccgtgaagatatggctgcccttgagaaggattatgaggaggttggtgtggattctgttgaaggagagggtgaggaagaaggagaggaatactaattatccattccttttggccctgcagcatgtcatgctcccagaatttcagcttcagcttaactgacagacgttaaagctttctggttagattgttttcacttggtgatcatgtcttttccatgtgt

SEQ ID NO: 2070 - DNA, 356 bp, Homo sapiens
acgcacaaactctattcaaaatgagaagttgtttgccaactctcatttcctaggataacacacatcacactgtttaagagtgggggaaagaatagtcatactgttagagcacaatgtttcctgaaaagaaactgatcaaaacgtttgaagcctttttagttgcctcaaagtgtgacagccactcaatactgctcctaacagtctgctttcagataacgtcataaaataaaataactgtgtgaaaagccatggccttcaaaaaactttatttggttatgagccaagctctgataggaaaagcccacctacgaaaaaaaggtgtgggtatttaagctggtctgattcacagagcttgt

SEQ ID NO: 2071 - DNA, 233 bp, Homo sapiens
actagtgttgtaactttccaagtaaaagtatcccctaaaggccacttcctatctgatttttcccagcaaatgaggcaggcaattctaagatcttccacaaaacatctagccatctaaaatggagagatgaatcattctacctatacaaacaagctagctattagagggtggttggggtatgctactcataagatttcagggtgtcttccaactgaaatctcaatgttctcagt

SEQ ID NO: 2072 - DNA, 341 bp, Homo sapiens
acttggcacttcagtttcaaacacgtagtcctttaaaacttgatccgatagctttaatgcggccggtcctctctcagtcaggaaaattgcacagaccgacagtcgtgaggatggcagagctgctgcattcccccacacggggatttctgtgtctgcttggcgacctccctgcgtgcacggcctaggaggtgcacgggccaccatagtcacactggcactgaaaagaaagcgttgccctggtgattctttcccccccgtttgtaatgttaactgatcaggaagcgcagtttgggtgggatgccgaatcgtcgtgctgacattgagtcacggatgaggaaggt

SEQ ID NO: 2073 - DNA, 517 bp, Homo sapiens
  misc_feature 470: n = A,T,C or G
acaaataaagtgcatttttaaatagctctatttaactttggtggatgaagcttcaaactttatattaaggcacctggaattctcccccccttctttttcaaacaccaggaaaatgcattcacaaaatttatagttacacggacagaattttagtttatctaatgtaattttagcccatttaggtcaaacataaactcaattttcaaagtaacattgtttggaaaacattttcaacagactaattttacagaacattttttttctgtagactaattcatgaacgaagatcaatgaccaatattagtgttacttactctgtcattagcaatttcaaacagtatgatgattcatatactgagcttttgaaaaatcccacaagtttgagaaatagttacacagtatttttgtaaggaattttttgtctaatcttgtgtcaagttgatgtcactaatataccaatcaattaagtncataatctctgataaactatggttgacaaatcacatgaagtacctgc

SEQ ID NO: 2074 - DNA, 298 bp, Homo sapiens
acttcatataagtggaatcatatagtatttgtccttttctgtctggcttatttcacatataatgtcttccaggttcatcatattgtagcacatgtcagaatttcattcctttttaaggctgaataatattccattatgtgtataccacattttgtttatccattcatccatcaatagacatttgggtatttccaggacaatatattcttaatttaatcccacattttaagacttacaggtaatttaaattcaattcaacttactgagtatttactaagggtaactcactatgggaagt

SEQ ID NO: 2075 - DNA, 483 bp, Homo sapiens
acaacagcggtggtggccctgatacgagagaagcagttgattgtagccaacgcaggagactctcgctgtgtggtatctgaggctggcaaagctttagacatgtcctatgatcacaaaccagaggatgaagtagaactagcacgcatcaagaatgctggtggcaaggtcaccatggatgggcgagtcaacgggggcctcaacctctccagagccattggggaccacttctacaagagaaacaagaacctgccacctgaggaacagatgatttcagcccttcctgacatcaaggtgctgactctcactgacgaccatgaattcatggtcattgcctgtgatggcatctggaatgtgatgagcagccaggaagttgtagatttcattcaatcaaagatcagccagcgtgatgaaaatggggagcttcggttattgtcatccattgtggaagagctgctggatcagtgcctggcaccagacacttct

SEQ ID NO: 2076 - DNA, 276 bp, Homo sapiens
acctctcaacattaccaaaatcatttctttagagggaaggaataatcattcaaatgaactttaaaaaagcaaatttcatgcactgattaaaataggattattttaaatacaaaaggcattttatatgaattataaactgaagagcttaaagatagttacaaaatacaaaagttcaacctcttacaataagctaaacgcaatgtcatttttaaaaagaaggacttagggtgtcgttttcacatatgacaatgttgcatttatgatgcagtttcaagt

SEQ ID NO: 2077 - DNA, 308 bp, Homo sapiens
  misc_feature 68: n = A,T,C or G
acatttattcttaacacgtggaacatatagtataaagatttcatactgaataaatgatattcattaanccaaaaaaggaaaaaaaggaggaatttacatcaagttttagctacattgttgaaatacaaatatgcagattttatcactgaaaaaatctcaattgtgtttcttcatcagaacttcaactgaacctagaactttttcacacctcgattagaaagaaaacaaaacaaaacaaaaacccagaaaaaaataaactataagttgattggctgctgagacggcaaggactttttacagagacctgt

SEQ ID NO: 2078 - DNA, 334 bp, Homo sapiens
  misc_feature 37, 97: n = A,T,C or G
acacagttagtgggagcacactatataaatcctttgnatgacaccattcaacaatattttttaaaatctacaaaattttaaagtttcacttccctancaaaatatcttcagtcaagaaattagtctttgaaaattatgaaaattgttgtgggaaatatttatacaaattattactgataatgcacatatattttgaaacattgtttctagaagcaataaaatataacctatttaggagataacccaaatgatttgtaaaaaaattaacttgtagaaaagggaaggatgttgtgtaaaatcaagtcaattatttgaggtttttataatattgagt

SEQ ID NO: 2079 - DNA, 426 bp, Homo sapiens
  misc_feature 68, 69: n = A,T,C or G
acaggaatggaaggagcattcactgcaggaggcctcagcacatcactcggtggtgataaagccactcnnccagtcagggatggaggagggggcccccctgccagcatcaggaccagacctctgggcatggctgatcccagctctggaatctgaagggatgacagggactttcacctctgctggtttgaagtctctaagcagttctgaggcgggcagtcttctcctgggagaagtcctcagaaacctttggaaagggaagaagctacgctaggccacagtgcataccacgaatgagaacaatggcagcggctgccgacaactctggatctaacacaaagacagatgacaaggggcagtgtcctgccaaggaatccactttacttcttttgagactggtttttacacatggtaaggatttgcttcagt

SEQ ID NO: 2080 - DNA, 554 bp, Homo sapiens
  misc_feature 457, 458, 498, 516: n = A,T,C or G
acatgccaaattataaataggtgctactggccttgagcatatcactgtgggacagttccccaattgtcaagtgtttagatatgtagactattgccatttgtttttttgttttggttttgctttgtgtctgaagctgaattgatttctttttttgaatgtgaaagttgaatttcaaacgtagtcatttcttacagatggccaagacagaaaattgtggctaggttgactgagaactgttgtcttccatgtattaacacaattaagctttttatattccactctctgtgctgaccctggctgaggcattttgggagacaaggactctgaatcttctgcttccattaaagaagaactgtgatattcaacattggatttctgagaataaagataggatgattcctttgaactttgacttacttgtataaaatgtccagctaggtttaggtttttgccattnnctatatactttgggtaaagctacatttgatgagcaatgtnaatgtttctgagaatgtncattcctgttttctcttaagagaatgtgctgtgtacct

SEQ ID NO: 2081 - DNA, 227 bp, Homo sapiens
  misc_feature 74, 75: n = A,T,C or G
acctgtgtgtatagaaatagattagagcacagttgaaattcatggaactggcattatttaagcaactggaattnnacactgtaggaaggttttgaaaattgtttggttgtagattttatcttatcctttagtgttgtgttcctactgtgatgtcttggtttttgtcatagacttaagtttataagtttgaactggacttgttcgattataaccacaaattgtgtgtg

SEQ ID NO: 2082 - DNA, 488 bp, Homo sapiens
  misc_feature 71, 72: n = A,T,C or G
cagcagccaccacagcgcctgcttcctcggccctgaaatcatgcccctaggtctcctgtggctgggcctanncctgttgggggctctgcatgcccaggcccaggactccacctcagacctgatcccagccccacctctgagcaaggtccctctgcagcagaacttccaggacaaccaattccaggggaagtggtatgtggtaggcctggcagggaatgcaattctcagagaagacaaagacccgcaaaagatgtatgccaccatctatgagctgaaagaagacaagagctacaatgtcacctccgtcctgtttaggaaaaagaagtgtgactactggatcaggacttttgttccaggttgccagcccggcgagttcacgccgggcaacattaagagttaccctggattaacgagttacctcgtccgagtggtgagcaccaactacaaccagcatgctatggtgttcttcaagaaagtttctcaaaaca

SEQ ID NO: 2083 - DNA, 120 bp, Homo sapiens
  misc_feature 18, 36, 43, 48, 64: n = A,T,C or G
ggaagggggggcacgaangctcatcattcaaaatanaacaaantaaanaagtattaaggcgaanattaaaaaaattttgcattacataatttacacgaaagcaatgctatcacctcccct

SEQ ID NO: 2084 - DNA, 279 bp, Homo sapiens
actgaccgccgcctgaatgtgtgggatttaagtaaaattggggaagaacaatcagcagaagatgcagaagatgggcctccagaactcctgtttattcatggaggacacactgctaagatttcagattttagctggaaccccaatgagccttgggtcatttgctcagtgtctgaggataacatcatgcagatatggcaaatggctgaaaatatttacaatgatgaagagtcagatgtcacgacatccgaactggagggacaaggatcttaaacccaaagt

SEQ ID NO: 2085 - DNA, 359 bp, Homo sapiens
acattataacctgtatggtattttatttaaaggagataaacagccaaatagcaaataggtcactgaatgataagatttgcaccttagaacaataatcattttaaggataacaagtaaatgtctgaaagcatgaggggctttatttgcctttacctcatatgagtctttgatcttgaaccgatacttttggatctcattgttgatatacctgaatttactttgtaagagattttaacttcacttcatgctgatgatgtatcaaattcattttatagaaagatttaaagtttttttctggaagtgatatatgtcaaattacatttcctactgcagtatttgagcagggacagtcatttttt

SEQ ID NO: 2086 - DNA, 175 bp, Homo sapiens
gcagcgcagaggaaaggcggcttttagccaggtatttcagtgtctgtagacaagatggaatcatctccatttaatagacggcaatggacctcactatcattgagggtaacagccaaagaactttctcttgtcaacaagaacaagtcatcggctattgtggaaatattctccaagt

SEQ ID NO: 2087 - DNA, 332 bp, Homo sapiens
  misc_feature 258, 259: n = A,T,C or G
acaaagtaaaataaataaataaatacacattttggcctattagcaaagattaagaaatgataacattaaatactcaataaatcaccatgagatggggactcaaacttctggtaaaaatacaaatagatataatttttcttgaaggcaatttagtagtctgtttatcctataattctacttgtaagatcctatcatatgaaaataaccagagatacaaagacattctgcaaagatatgttttatattgttatttattgnnacaaaaggaaataaaaagcctaaatgttcagaaaattattttaaaagatgaaagagggaaataggccatggac

SEQ ID NO: 2088 - DNA, 113 bp, Homo sapiens
acagcacaagaatgaacaatgggctattctttgaaaactcaaaacaaatgatttacacaaagacatatctataacataaaggtgaatggaccatgttattcttattcttaagt

SEQ ID NO: 2089 - DNA, 267 bp, Homo sapiens
  misc_feature 25, 41, 42, 76, 98, 107, 155, 159, 179, 239, 251: n = A,T,C or G
acttgtatacaagtaacattttatntaccataaaaatgtgnnacttctacaaaacccacaaacagtgaaaagacantctggtaaatccaaggtttgtnaaaactatncacaaaacccacagtatttgggaaaagaggcaaggtttatacaagtancagntttaaaaatgtaactttgtnctactatcaattacacattaacatacacacactaattgaaaatatgctacaaccatgttntggaaaagcagnttaacattttctaaat

SEQ ID NO: 2090 - DNA, 293 bp, Homo sapiens
attttagattgaaaaatatttagttgtctcattacctcttctaaacacaaaccagctgatgtattttaatctgtttctgttctatcttgtaattaatttggtgggttctacttgttttaacataaataaagagtatgcagcacgtttaataaaatcagaactcttaattggcttatgcccaggtctaggctgagaagtcctttttcttcttcccacctttatttccttagtttctgtccaccttaatcgaaacaacacatggttatgtctttttcctgctacaactacagggt

SEQ ID NO: 2091 - DNA, 538 bp, Homo sapiens
acactatgctgtatttggtgctatacctgcaggcccgcttcacttggcgaggagcccgcctgctccggcccctcctgcagttcaccttgatcatgatggccttctacacgggactgtctcgcgtatcagaccacaagcaccatcccagtgatgttctggcaggatttgctcaaggagccctggtggcctgctgcatagttttcttcgtgtctgacctcttcaagactaagacgacgctctccctgcctgccctctgctatccggaaggaaatcctttcacctgtggacattattgacaggaacaatcaccacaacatgatgtaggtgccacccacctcctgagctgtttttgtaaaatgactgctgacagcaagttcttgctgctctccaatctcatcagacagtagaatgtagggaaaaacttttgcccgactgatttttaaaaaggaaaaaaaaaatgttttactatgtggccttccaaaataggtagtgtttgcctatgtggaaacaacagcaaactaacaccaagtgccagagt

SEQ ID NO: 2092 - DNA, 498 bp, Homo sapiens
  misc_feature 480: n = A,T,C or G
actcatgcccgactgtctaccaggcacacagactttgaggagagggcgtatgtcgtcttgatccgcatcaatgatgggggtcggccacccttggaaggcattgtttctttaccagttacattctgcagttgtgtggaaggaagttgtttccggccagcaggtcaccagactgggatacccactgtgggcatggcagttggtatactgctgaccacccttctggtgattggtataattttagcagttgtgtttatccgcataaagaaggataaaggcaaagataatgttgaaagtgctcaagcatctgaagtcaaacctctgagaagctgaatttgaaaaggaatgtttgaatttatatagcaagtgctatttcagcaacaaccatctcatcctattacttttcatctaacgtgcattataattttttaaacagatattccctcttgtcctttaatatttgctaaatatttcttttttgangtggagtcttgctctgtc

SEQ ID NO: 2093 - DNA, 243 bp, Homo sapiens
gtctcctgcagcgtctggggtttccgttgcagtcctcggaaccaggacctcggcgtggcctagcgagttatggcgacgaaggccgtgtgcgtgctgaagggcgacggcccagtgcagggcatcatcaatttcgagcagaaggaaagtaatggaccagtgaaggtgtggggaagcattaaaggactgactgaaggcctgcatggattccatgttcatgagtttggagataatacagcaggctgt

SEQ ID NO: 2094 - DNA, 193 bp, Homo sapiens
  misc_feature 11, 12: n = A,T,C or G
ggtagaggttnntctattttaacatttctgaaatcatatagatttacatgattgttctcacgtaacctgtaacataagcatttcccaagttgctattatctgttaataacagtggtttgattaattggattggctgtgtggatgtggaacggaagagccttgatgtcaagaagagctgaagcacagaaggtgc

SEQ ID NO: 2095 - DNA, 340 bp, Homo sapiens
caataattgaggagcagcccaaaaactatcaagtttggcatcataggcgagtattagtggaatggctaagagatccatctcaggagcttgaatttattgctgatattcttaatcaggatgcaaagaattatcatgcctggcagcatcgacaatgggttattcaggaatttaaactttgggataatgagctgcagtatgtggaccaacttctgaaagaggatgtgagaaataactctgtctggaaccaaagatacttcgttatttctaacaccactggctacaatgatcgtgctgtattggagagagaagtccaatacactctggaaatgattaaactagt

SEQ ID NO: 2096 - DNA, 306 bp, Homo sapiens
acaggtggtcattacagaccctgaaaaactggaccaaattagacagagagaatcagatatcaccaaggagagaattcagaagatcctggcaactggtgccaatgttattctaaccactggtggaattgatgatatgtgtctgaagtattttgtggaggctggtgctatggcagttagaagagttttaaaaagggaccttaaacgcattgccaaagcttctggagcaactattctgtcaaccctggccaatttggaaggtgaagaaacttttgaagctgcaatgttgggacaggcagaagaagtggt

SEQ ID NO: 2097 - DNA, 324 bp, Homo sapiens
ggaagagcaaccgagatgaaggtgaagatgctgagccggaatccggacaattatgtccgcgaaaccaagttggacttacagagagttccaagaaactatgatcctgctttacatccttttgaggtcccacgagaatatataagagctttaaatgctaccaaactggaacgagtatttgcaaaaccattccttgcttcgctggatggtcaccgtgatggagtcaattgcttggcaaagcatccagagaagctggctactgtcctttctggggcgtgtgatggagaggttagaatttggaatctaactcagcggaattgtatccgt

SEQ ID NO: 2098 - DNA, 432 bp, Homo sapiens
acactccagcgaagccgaggcccggccaacgctcgtgaagtttccacagagaagagcctgcaaaactcccactggaagaggagaaataaaggccatggaaagaaaccccagggaagagacaggcctcgttcacagaccctaggcagggaataaaaaattcaagtcattcacagaagtcttgaaaggcatgaggatttctgacagttcctagaaaaaggcaacattttctttatctttgtatccattggccaagaacgccgacatgtgagacttgcttcaccagccgccaccgcttccttacaatctcccgcactgctggagcgggctgggtaactacaggactgtgctctgtgtgataagatttggtgattccactttataagaaaggaaactgctttaattaaagcaggttaataattaaaacttcaaagt

SEQ ID NO: 2099 - DNA, 506 bp, Homo sapiens
actcaacaacttcaattcatttttttctggttcaagatgagtaggagcctaataaggctgtgataaaagggcaaaaggcactgagagccaaaagcggattaatgagctcctccatttatttgtcttcctaacagctgaactgttacaactattgacactcttcaaaaaggttccgctctgaaccctgtccaggcactgcaggctccaatggacatcttcaaatccagagaatggaggggcaagagcttcccctgtgtgatgccaaaaccaacaaagccccatggatcaggtaatgaaacttcagcttttccccctttgagatttatttactggcagctgacaaagggcaaattcagctcgaattgtgcagtcaaggccctgtcaagcttttagaggcacccttgtcttgaagcaccttcatgactggcatttcactcaaaagccctcggcactggtccttaacagcttatgacatcacaaaggacactccagacagatgcctacat

SEQ ID NO: 2100 - DNA, 550 bp, Homo sapiens
  misc_feature 491: n = A,T,C or G
acagtatattttaaattaagaaaagtgaactatatgtatttgttttatacatttaaggcttagactcataaataatgctattgtttatgatttgaaaactttcaggcaaaatccaatttacatttttcccttccctagcaattacttttttccagcttcaactcttcttagttactaatactttgttgactttaaaaatgaaatcattcacaaacttttggtatatgatggagaatgaaaaactagagtcagacagctttaattgacattgtcaacacctccagttatcaggaatacatttttttactgccttaacctgtagtgcgtagaatatgcatcaatttcttgaaggagattcatgtttttataagaattttcatgtaattattgcaattgtggtcaaataaggaacgtttcctgcttgaaattatattgatttaaatgatgtgtgagatgtttcaccattttcaggcactgtgtaattctattgnaaataaactggcaggtatctttgtaactataaaatagtgcatgctcagccatgtacctg

SEQ ID NO: 2101 - DNA, 365 bp, Homo sapiens
  misc_feature 273: n = A,T,C or G
gttacatgtctttattacataaacatcataatatttctcataggagttggtcttcagtttgcttgttgctttcgcagaatgtcaaatatctatagaaaatgtctaattatttatgaacaaacattcccatccctgccccgcaaaaaatctcattgcctgcaattcctaaccagattcctgagaaaaataataggatttattttatagcatcatacatagattttctttcaagatataaaaaaggacagacttctaaaacatgaatctcctttngtttacaaagttctataaaaatacattaagtatgttcaaatgtttgttctttcactttatattccagtttaccagaaacaaaaaatggcagt

SEQ ID NO: 2102 - DNA, 182 bp, Homo sapiens
acagggaggaatttgaagtagatagaaaccgacctggattactccggtctgaactcagatcacgtaggactttaatcgttgaacaaacgaacctttaatagcggctgcaccatcgggatgtcctgatccaacatcgaggtcgtaaaccctattgttgatatggactctagaataggattgcg

SEQ ID NO: 2103 - DNA, 281 bp, Homo sapiens
acctccgaatcaattaccgccaattcttcacagcacctgccactgtctccctggtgggagtcaccgtcttcttcagcttcctagtatttgggatgtatggacgataaggacataggaagaaaatgaaaggcatggtctttctcctttatggcctccccacttttcctggccagagctgggcccaagggccggggagggaggggtggaaaggatgtgatggaaatctcctccataggacacaggaggcaagtatgcggcctccccttctcatccacaggagt

SEQ ID NO: 2104 - DNA, 255 bp, Homo sapiens
  misc_feature 11, 200, 222: n = A,T,C or G
acctgcgatgnttacgtccacaccgagcccagtgtgggactgacatttctcaatggaagtgaaatttgggattggactttgaagacggattactaaataataattattatatgtaactgaagcaacctacttttgaaaatcaactgtattgggtagtgggaggtgggagggaagggctttgggaaggggatgaatatctntttttacctttaacagacttgnttaatcttctcgatgtaggatgtttatgtaggt

SEQ ID NO: 2105 - DNA, 143 bp, Homo sapiens
  misc_feature 13, 14, 73: n = A,T,C or G
ttttttttttttnnttttttttttttttagaggaaaacccggtaatgatgtcggggttgagggataggagganaatgggggataggtgtatgaacatgagggtgttttctcgtgtgaatgagggttttatgttgttaatgtgg

SEQ ID NO: 2106 - DNA, 397 bp, Homo sapiens
ggtgatcagggctgaacagagagaactcaccatggactttgggctgagctggcttcttcttgtggctattttaaaaggtgtccagtgtgaggtgcagctgttggagtctgggggaggcgtggtccagcctgggaggtccctgagactctcctgtgcagcctctggattcaccttcagtaactatggcatgcactgggtccgccaggctccaggcaaggggctggagtgggtggcagttatatcatatgatggaagtaataaatactatgcagactccgtgaagggccgattcaccatctccagagacaattccaagaacacgctgtatctgcaaatgaacagcctgagagctgaggacacggctgtctattactgtgcgaaaaggccgaatcggggt

SEQ ID NO: 2107 - DNA, 515 bp, Homo sapiens
acctctatgtttaaagaaagaagaaaaaaacccagaatttggttgtagaaaacaatgcccacaacagactggccagtgcttagacaaatttggggttggggggaacactttggtttgaaagcacagagcagtttgccatgtttcttctgtgcctaccattctcccttggcctcaacttctgtaagatgggggggggacaaaaagagaagtaaagttaagaagaaagtggaaaattaaaaaaaaagatgtcaaagtttttacatgcatatatttcagcttatgctgaagacctacctgtatgttgcacattgaatcatactttcagaacccctcagaaaccatccctctctccctaaagaattttaaaaggaaaacaaaacctcgagtatagatcttacagatgagcaagcattcaggccttagccaaagaatgcagtggagccttcccccttcaactgcattgtgaatgaataccaattaacagcataaaaattaatagtcccatatcagatctg

SEQ ID NO: 2108 - DNA, 88 bp, Homo sapiens
  misc_feature 36, 40, 50, 55, 70: n = A,T,C or G
acaagctttttttttttttttttttttttttttcgnaaanatggggtttnaccgngttagtcaggatggngtcggtctcctgacctcg

SEQ ID NO: 2109 - DNA, 499 bp, Homo sapiens
  misc_feature 415: n = A,T,C or G
accctccagaaattggtgactttgcttttgtgactgacaacacttatactaagcaccaaatcagacagatggaaatgaagattctaagagctttaaactttggtctgggtcggcctctacctttgcacttccttcggagagcatctaagattggagaggttgatgtcgagcaacatactttggccaaatacctgatggaactaactatgttggactatgacatggtgcactttcctccttctcaaattgcagcaggagctttttgcttagcactgaaaattctggataatggtgaatggacaccaactctacaacattacctgtcatatactgaagaatcttttcttccagttatgcagcacctggctaagaatgtagtcatggtaaatcaaggacttacaaagcacatgactgncaagaacaagtatgccacatcgaagcatgctaagatcagcactctaccacagctgaattctgcactagttcaagatttagccaa

SEQ ID NO: 2110 - DNA, 100 bp, Homo sapiens
acttcaactaccatgtgaaacacatccttatctgcataaattggaatatcatgaaatggagatatatattgtcctttctcatttttgaggaagactcggt

SEQ ID NO: 2111 - DNA, 200 bp, Homo sapiens
acacctcggagcagtcgggcagcaggagggccggaagcctggttggtttgtatatgacctctcttgcccttgtgcactttccttgatttagcaaccttgacctgcactggccctcacagctgttggagggaagtagcctcttgcagggaaatattttcccctgccctggaatctcctatgtgcctgttaaagattccagg

SEQ ID NO: 2112 - DNA, 523 bp, Homo sapiens
  misc_feature 472, 488: n = A,T,C or G
cgtggacgccgccgaagaagcatcgttaaagtctctcttcaccctgccgtcatgtctaagtcagagtctcctaaagagcccgaacagctgaggaagctcttcattggagggttgagctttgaaacaactgatgagagcctgaggagccattttgagcaatggggaacgctcacggactgtgtggtaatgagagatccaaacaccaagcgctccaggggctttgggtttgtcacatatgccactgtggaggaggtggatgcagctatgaatgcaaggccacacaaggtggatggaagagttgtggaaccaaagagagctgtctccagagaagattctcaaagaccaggtgcccacttaactgtgaaaaagatatttgttggtggcattaaagaagacactgaagaacatcacctaagagattattttgaacagtatggaaaaattgaagtgattgaaatcatgactgaccgangcagtggcaagaaaangggctttgcctttgtaacctttgacgaccatgact

SEQ ID NO: 2113 - DNA, 295 bp, Homo sapiens
acagtcagaatattcctgttcctactacagttcctgttcctgtgccagttcctgtttttctgcctgctccattggacagcagtgagaagattcctgcagcaattgaggagctaaaaagcaaggtttcttcagatgctcttgatacagagttgcttacaatgacggatatgatgagtgaagacgaggggaaaacagagacaaccaacatcaacagtgtaattattgaaacagatataattggttcagaccttttgaagaactctgacccagagacacagtccagcatgcctgatgt

SEQ ID NO: 2114 - DNA, 160 bp, Homo sapiens
  misc_feature 11: n = A,T,C or G
acctgctgtantcacgagggacgggcggcggcctggtcggcagagagtagcctgcaacattcggccgtggttacgatgagtttacccctcaatcccaaacctttcctcaatggactaacaggaaagccagtgatggtgaaacttaagtggggaatggagt

SEQ ID NO: 2115 - DNA, 183 bp, Homo sapiens
acgcatcatgtggtctcagcgtgatccatcacttcgcaaaagtggagtaggcaacatattcattaaaaatctggacaaatccattgataataaagcactgtatgatacattttctgcttttggtaacatcctttcatgtaaggtggtttgtggtgaaaatggttccaagggctatggatttgt

SEQ ID NO: 2116 - DNA, 306 bp, Homo sapiens
acgacatctcagacatgacttctattgccaggctggtcaagtggcagggtcatgagggagacatcgataagggtgctccttatgctccctgctctggaatccaccagcgggctatctgcgtttatggggctggggacttgaattggatgcttcaaaaccatcacctgttggccaacaagtttgacccaaaggtagatgataatgctcttcagtgcttagaagaatacctacgttataaggccatctatgggactgaactttgagacacactatgagagcgttgctacctgtggggcaagagcatgt

SEQ ID NO: 2117 - DNA, 132 bp, Homo sapiens
  misc_feature 12, 29, 31, 69, 84, 117, 118: n = A,T,C or G
acagggcctgcntgaactcaacggaaatnancccatggagatcaaagtcctgggtccttatacctttancatctgtgacacctncaacttctccgactacatccgtggaggcatcgnnagtcaggtcaaagt

SEQ ID NO: 2118 - DNA, 191 bp, Homo sapiens
acaattaaacattttcaaaaggtgtaatttatttaaaattgtctcattttggtaaaatttatgtgaacttttaaagctaaatattaaacttaatatgctatgtaaatatatacatatatacatttaatgatgtatttttttaaaacattggcttgcttttgttaaagtgcaagtgttacatatggctttgt

SEQ ID NO: 2119 - DNA, 359 bp, Homo sapiens
accatcaagctcaaggtgtttctgtcaggaatgccagagctgcggctgggcctcaatgaccgcgtgctcttcgagctcactggccgcagcaagaacaaatcagtagagctggaggatgtaaaattccaccagtgcgtgcggctctctcgctttgacaacgaccgcaccatctccttcatcccgcctgatggtgactttgagctcatgtcataccgcctcagcacccaggtcaagccactgatctggattgagtctgtcattgagaagttctcccacagccgcgtggagatcatggtcaaggccaaggggcagtttaagaaacagtcagtggccaacggtgtggagatatctgtgcctgt

SEQ ID NO: 2120 - DNA, 361 bp, Homo sapiens
  misc_feature 310, 351: n = A,T,C or G
actaccttaccctagagtaaatcactgggaaatacaggcagaaaacagacatcctgcctgtgaaaacaattgcatattcaaactggagagagtcatagcacgtatgcttttaaaagtaagtttcgaaaaactgttttatcagttttgttttttttttttttttggagcatgtcttttctaaataattctcacttatcattccagaaaatataacaaacagtttgtaagaactcatgcaaaaatgtttctctaaggccataaattggtttgctaagttgcattgttttattcaagtaaaaagcccttctanagaacaaggagtctgtaaagaaaaccaatcaccttcaactnttgggcctgt

SEQ ID NO: 2121 - DNA, 82 bp, Homo sapiens
  misc_feature 16: n = A,T,C or G
acttttatgttactgnctgtaaagagggatttaaaatgtgtattttaaacacagcagttgagctgagtgcattttctatagt

SEQ ID NO: 2122 - DNA, 287 bp, Homo sapiens
accttcagatgggcactcagaagagtaagcccttagttaatgtttaaagatgtttaaagatgtctgagactcataggtcaaagtcagatttcagttccaccttattagacctgcactgctaaggagctgctttaggtaaggctgtgttcctagtcaccagggtgttcaaacacagtgctgggggcaatgtgggaatagccttcttttatttaggaagtaatgtgaagtcagtttcatgaatagatcttactttaagcattcattgaggtttttggcaagaatagagt

SEQ ID NO: 2123 - DNA, 335 bp, Homo sapiens
accacttgcagtcaaatgaattccttcgaaatgtatttgaacttggacccccagtgatgcttgatgctgcaacgcttaaaacgatgaagatttctcgtttcgaaaggcatttatataactctgcagccttcaaagctcgaaccaaagctagaagcaaatgtcgagataagagagcagatgttggagaattcttctagattttcagaacttgaagactattttctaatttctattttttttctatttcaatgtatttaaactctagacacagtttttatcctggattaacttagataacttttgtagcagtggttatattgcttataatttaatgt

SEQ ID NO: 2124 - DNA, 513 bp, Homo sapiens
acgaggtggctcgactgctcaacctcaccgagaggcaggtcaagatctggttccagaaccgcaggatgaaaatgaagaaaatcaacaaagaccgagcaaaagacgagtgatgccatttgggcttatttagaaaaaagggtaagctagagagaaaaagaaagaactgtccgtcccccttccgccttctcccttttctcacccccaccctagcctccaccatccccgcacaaagcggctctaaacctcaggccacatcttttccaaggcaaaccctgttcaggctggctcgtaggcctgccgctttgatggaggaggtattgtaagctttccattttctataagaaaaaggaaaagttgaggggggggcattagtgctgatagctgtgtgtgttagcttgtatatatatttttaaaaatctacctgttcctgacttaaaacaaaaggaaagaaactacctttttataatgcacaactgttgatggtaggctgtatagtttttagtctgtgtagtt

SEQ ID NO: 2125 - DNA, 287 bp, Homo sapiens
accccccaacacacacaaattgggaatgaaatatgtaattatagccatctttatatgaaatatccaaacaacaaatatatttaataatataaagatagtgccaaaatcaacaaaaactaagaatactgaggcttaactgaccccgattcgtatgattttgaaataaaatgttcagactttctagctttatcttaatttgcctttgcttcactgctttatgtagttacaatgtaaatctaagagatgcttaaaacagattaaaataatattgttaaaaaacatttttc

SEQ ID NO: 2126 - DNA, 244 bp, Homo sapiens
acaaaaatggttataaaatggttgaagcaactagaagcgtgacaggtataatacatataaatacagccaaaattcaattcaatgcaaagttgaatgacatcatattgcaccaaaatttattccatacaaaagcacatgcatcaagagtttccataagatgaaaacaaacacacttacttcatagcatcttaccacttacttacacaaatagcccataaacaccatctggcattgtgattgcagt

SEQ ID NO: 2127 - DNA, 389 bp, Homo sapiens; identical to SEQ ID NO: 1865

SEQ ID NO: 2128 - DNA, 173 bp, Homo sapiens
acacaaagaccatcgagacggccattcttgtttacaaaacacttaccaagaaagcactttgtaggggaactttagtaagttcttctcatttcattatgtttcttccaaggaaacaggagagactgaattaataattctctctttcctcttaagcacttttaaaataataaagt

SEQ ID NO: 2129 - DNA, 257 bp, Homo sapiens; identical to SEQ ID NO: 1118

SEQ ID NO: 2130 - DNA, 408 bp, Homo sapiens
cgccctcctctgaggagcttcaagccaacaaggccacactggtgtgtctcataagtgacttctacccgggagccgtgacagtggcctggaaggcagatagcagccccgtcaaggcgggagtggagaccaccacaccctccaaacaaagcaacaacaagtaccctttgactcttagccagattaggatcttgatgagaacaagaggcattgattgttcttgaaagcatcattccaggtttgttgaaagtgggatactgaggtgagaaggggccagttagcacgcaccagagacaaagcttgggccttcaggggagtatgggttcttggctctgttagtatgtagaaggatttgtagcattttaaattgatgaacttgatctgggtcttcaaaaatatttttaggttagt

SEQ ID NO: 2131 - DNA, 541 bp, Homo sapiens
  misc_feature 491: n = A,T,C or G
acacttgaaaccaaatttctaaaacttgtttttcttaaaaaatagttgttgtaacattaaaccataacctaatcagtgtgttcactatgcttccacactagccagtcttctcacacttcttctggtttcaagtctcaaggcctgacagacagaagggcttggagattttttttctttacaattcagtcttcagcaacttgagagctttcttcatgttgtcaagcaacagagctgtatctgcaggttcgtaagcatagagacgatttgaatatcttccagtgatatcggctctaactgtcagagatgggtcaacaaacataatcctggggacatactggccatcaggagaaaggtgtttgtcagttgtttcataaaccagattgaggaggacaaactgctctgccaatttctggatttctttattttcagcaaacactttctttaaagcttgactgtgtgggcactcatccaagtgatgaataatcatcaanggtttgttgcttgtcttggatttatatagagcttcttcatatgtctgagt

SEQ ID NO: 2132 - DNA, 176 bp, Homo sapiens
acaccccgttagtccctgatcccaaccttctccctcctgccagcacaccgatgcacacaccggaagtggcgagcccaagccctggggacaggtgtagggagaaaagcagccccaggcctcagactcgcttcccatcctggcatagagtgggggatggctggagggtgtctataggt

SEQ ID NO: 2133 - DNA, 443 bp, Homo sapiens
actgaggctgctaaagctgccagtcacaacccagcatgtcaactggttcctcatgctctgtttggtgtggaaattcacatgtgccctgacactgaggaagcaattgcttaaaatcactttccaataacagctgataaaatattttgcaggtttgtcatgcaaggtttatttattaggtggctattcaaagtttgtatagcaaccacttaagcagaactaaattaatattcactgagcactgtaacgatggaagagggcttttcctaagggttgggttgggagttgtgcttctgtgaaattaacatctctcactcattgccaagattctctgcttaaaaatattagttttctgtgctgttgccaaaatagcaatttaagcaaatgtagtgccagaatgacacatgagcctcggactcagggaacagttccactgactgtggagt

SEQ ID NO: 2134 - DNA, 325 bp, Homo sapiens
  misc_feature 301: n = A,T,C or G
acaagcagttaatcacccaccatagggcatgattaacaaagcaacctttcccttcccccgagtgattttgcgaaacccccttttcccttcagcttgcttagatgttccaaatttagaaagcttaaggcggcctacagaaaaaggaaaaaaggccacaaaagttccctctcactttcagtaaaaataaataaaacagcagcagcaaacaaataaaatgaaataaaagaaacaaatgaaataaatattgtgttgtgcagcattaaaaaaaatcaaaataaaaattaaatgtgagcaaagaatnaaaaaaaaaaaaaaaaaaaaaaaa

SEQ ID NO: 2135 - DNA, 113 bp, Homo sapiens
acaagaatgcaatggtttcatccattcagcaaacaaaaatacatgtctgttttatttttgcctaaattctgctataatttgaacaaaattctaaaacaaaagccacacagagt

SEQ ID NO: 2136 - DNA, 312 bp, Homo sapiens
acttttcaattatgttaacgtaaaatactcgtaacgaatgtagtatgagtttaaagtgagcttttcagatcctataagtgcatcctaagtaatgacaggctttaagataaggaatatatgcattttgttaaggcagaaatctcataaaatttcatgaaaaaccatggtcaatccaatgatgcactttttaagacaagtttgtctggaaactggaagggtcaaaagacaacaaaaaagcacacaccaaaaaacctcactttaagcaaatctataacttgaaaaaaaaaagcctaagaatgttctgagagtggt

SEQ ID NO: 2137 - DNA, 393 bp, Homo sapiens
actcagaaatcatctgttctacctctttatgaagtaagttctttcttacatctttgtgttccaaaataatttgtagaatttagaagtgtaattttgttatattgcattctagaatacttttcaggagctccaggtaatgaggcggagcctgaatttgtttagaacacaaatgatggatttagaattggcaatgctgcgtcagcaaaccatggtttatcatcatatgactgaggaggagaggtttgaagttgatcagctccagggtttgagaaattcagtccgaatggaacttcaggacctggaactgcagctggaggagcgcctgctgggcctggaggagcagcttcgtgctgtgcgcatgccttcacccttccgctcctccgcactcatggt

SEQ ID NO: 2138 - DNA, 498 bp, Homo sapiens
  misc_feature 489: n = A,T,C or G
accacacaatactaacccttcccctcctctgatgtcttacatcacctcccaggagatgaagtgtattcttcactggtttgccaattggtcaggtccccagcgtgaacgtttcctagaggacctggtagctaaggcagtgccagaaaaattacaaccactgctggatagtctggagcagcttagtgtgtctggggcagaccgaccaccttctatctttgagtgccagctacatctttgggatcagtggtttcgaggctgggctgagcaggagcgcaatgaatttgtcagacagctggagttcagtgagccagacttcgtggcaaagttttaccaagcagtggctgctacagctggtaaggactgataggcattcagaccaaagaagataaccatagctgatggagccatgactctctacaatgataactcaattcaaatgtgttgcctaaagctctggaactggtattccaaccagctgaccgaactcantgaccaggt

SEQ ID NO: 2139 - DNA, 511 bp, Homo sapiens
  misc_feature 422, 432, 493: n = A,T,C or G
acaaataaagtgcatttttaaatagccctatttaactttggtggatgaagcttcaaactttatattaaggcacctggaattctcccccccttctttttcaaacaccaggaaaatgcattcacaaaatttatagttacacggacagaattttagtttatctaatgtaattttagcccatttaggtcaaacataaactcaattttcaaagtaacattgtttggaaaacattttcaacagactaattttacagaacattttttttctgtagactaattcatgaacgaagatcaatgaccaatattagtgttacttactctgtcattagcaatttcaaacagtatgatgattcatatactgagcttttgaaaaatcccacaagtttgagaaatagttacacagtatttttgtaaggaattttttgnctaatcttgngtcaagttgatgtcactaatataccaatcaattaagtccatagtctctgataaactatggntgacaaatcacatgaagt

SEQ ID NO: 2140 - DNA, 377 bp, Homo sapiens
tttacatcaagaattttggagaagacatggatgatgagcgccttaaggatctctttggcaagtttgggcctgccttaagtgtgaaagtaatgactgatgaaagtggaaaatccaaaagatttggatttgtaagctttgaaaggcatgaagatgcacagaaagctgtggatgagatgaacggaaaggagctcaatggaaaacaaatttatgttggtcgagctcagaaaaaggtggaacggcagacggaacttaagcgcaaatttgaacagatgaaacaagataggatcaccagataccagggtgttaatctttatgtgaaaaatcttgatgatggtattgatgatgaacgtctccggaaagagttttctccatttggt

SEQ ID NO: 2141 - DNA, 436 bp, Homo sapiens
  misc_feature 9, 339, 402: n = A,T,C or G
acacacaanagcctctataccacccacttggcagaccatcatcttgttcttataattattgcaagtgaggttagaaagaattccagctgcacaggtgaccacatttatatcatctgaacccagaagctgaacaagagtcccaaggagaccttccatcccttcctgtttagttgcagcatctgaaagattcctgagagtccaaagacagttctgaacaagacgttgacttggatctgtcaggtgaagtcctaaagcttgcattccaccagcttctacaatagccggcttattactagagcagacagatagcaccttcagcactctgcttgtggtccatantagtttttcgtaagtataggtcctcattatatttactaaagcttggggtccaccactagccantatgatgagcttgctttcttggttgccataagct

SEQ ID NO: 2142 - DNA, 393 bp, Homo sapiens
gtaaattctcccaggagctgttttactgtctacttttcaggattaaaaaaaaaatcaaaacttaaaaaaaaaaagtttaaaaagcaaaatggggagggggaggaagcagtgacttttttttggtaattatgcgcttttttttaatttttagaatttgtctttttactgtgggtgggctgttgatatttcatcaagataagcatttctttcctgagttcaggtgactgaggaagagccacaaaacaaaacacaacaaaaccaaaccacagaatcatctttaacccaactttttatacgatgccccagttccccataactttgcacacaagcttctgtgttcagttgaattgtaactgctttttgtatttggagagagtgactattgaacttgaa

SEQ ID NO: 2143 - DNA, 398 bp, Homo sapiens
caggtgaaggaactgagcagttgaactctgagttcatcaattgtaatatttggaaattatctacaatggaatcttccctctgttctctgataacctacttgcttactcaatgcctttaagccaagtcaccctgttgcctatgggaggaggtggaaggatttggcaagctcaaccacatgctatttagttagcatcagttgtcgccaacagtctttctgcaaagggcaggagagctttgggggaaaggaaaaggcttaccaggctgctatggtcaactcttcagaaattttcagagcaatctaaaagcgccaaaattcgctatgtttacagtgatactattaagaaaatgaatgtgattctgctctgtctttttaagtatgatcaaataaaaaatttgt

SEQ ID NO: 2144 - DNA, 96 bp, Homo sapiens
  misc_feature 12, 14, 15: n = A,T,C or G
actttaaggttngnngcacttacaaggctgtggtagaatcataccccatggataccacatattaaaccatgtatatctgtggaatactcaatgtgt

SEQ ID NO: 2145 - DNA, 557 bp, Homo sapiens
acagtagaagctctgcaaaatcttaaaaatttgaaaagtcttgacctgtttaactgtgagatcacaaacctggaagattatagagaaagtatttttgaactactgcagcaaatcacatacttagatggatttgatcaggaggataatgaagcgccggactctgaagaggaggatgatgaggatggcgatgaagatgatgaagaggaagaggaaaatgaagctggtccaccggaaggatatgaggaagaggaggaggaagaggaagaggaggatgaggatgaggatgaagatgaagatgaagcaggttcagagttgggagagggagaagaggaagtgggcctctcatacttaatgaaagaagaaattcaggatgaagaagatgatgatgactatgttgaagaaggggaagaagaggaagaagaggaagaaggaggtcttcgaggggagaaggggaaacgagatgctgaagacgatggagaggaagaagatgactagatcattctaagaccagattctctaatgttttctgggtgtgcaatagagtgatcacatctttg

SEQ ID NO: 2146 - DNA, 434 bp, Homo sapiens
acttgcatgtaggacaactcagttagaaaagtatagtgaatggatggaatctactgtatgataaaaatgctacaaacaccatttagttgccatcaataagaaatttacttgttttaaaaaaatccaaatgctggcattgtccagaaaaatttaacaggtttatttataattattataaagttgaaccgctgaaacttgttcactgaaacatttcattctcaaaaaaaaaaaaaatttctcttcttcctgttattggtagttctgaacgttagatattttttttccatggggtcaaaaggtaccagccaggctgatcaaaaagttctaattgaggacatcccccccttcccaaatttaaatcttgtatgctggaaaaataatttaatgtcagatgtaaacacaacactttcaactagaggagtggcagctggggt

SEQ ID NO: 2147 - DNA, 428 bp, Homo sapiens
  misc_feature 33, 69, 120, 131, 162, 242, 315, 370, 379, 415, 420: n = A,T,C or G
gcttttttttttttttttttttttttttctttnaaaattatttttatgtttatttcacttgaacaaaanaaaaagcaactaataaaattgaaggaagagctgaactaccgaatatttttntttaactcaanaactttcagttacaggaagatttatctaatnttaaaatgactaaattacaaaaagcataaaatgtttgaagccatttttaaagttgttttgaaatccatattagcactcanacttccccactccctaacttttgttaattgctgtaatggacatttgttgttttgatctacccaacatcctttnatcctactttggtaactgatattctttgggggaactgatctttccactttacatnatgttttgnggaaatttttcaactaaggaacctgccctatgctanctaanagttgagt

SEQ ID NO: 2148 - DNA, 532 bp, Homo sapiens
acctggggcagatccaacacatcctccgctgcggcgtcaggaaggacgaccgcacgggcaccggcaccctgtcggtattcggcatgcaggcgcgctacagcctgagagatgaattccctctgctgacaaccaaacgtgtgttctggaagggtgttttggaggagttgctgtggtttatcaagggatccacaaatgctaaagagctgtcttccaagggagtgaaaatctgggatgccaatggatcccgagactttttggacagcctgggattctccaccagagaagaaggggacttgggcccagtttatggcttccagtggaggcattttggggcagaatacagagatatggaatcagattattcaggacagggagttgaccaactgcaaagagtgattgacaccatcaaaaccaaccctgacgacagaagaatcatcatgtgcgcttggaatccaagagatcttcctctgatggcgctgcctccatgccatgccctctgccagttctatgtggtgaacagtgagctgtcctg

SEQ ID NO: 2149 - DNA, 458 bp, Homo sapiens
  misc_feature 401, 455: n = A,T,C or G
acattacaggaattgtatgttcacttcgaatcatgtttgaaaaaacgttgtatccttattttgtaattcatatagtaagagtattctaaacagcactacattaatatcatttgataggtataaagtatactttttcttgcactcttctctaggatttaatgcattgatcattcttaatgaacaatatcagctctaaaggaccaatgcttttataatgttttcaactgtatctgagtcagccagagagataaatatccatgtataaaatagatagaaaactttgcttggtaatttaaaattaataatgccagttttccaagagtgagaaaatcattgcactctatacagttttaagatatacttaaaatattcccatttgtatctatttttttttctactgntttttatttggacacttacataacaggtgcagagcacaatgctgtgtaacatangaa

SEQ ID NO: 2150 - DNA, 450 bp, Homo sapiens
ataaggaatttcctcccaattcatggatatggccatcatctgattagtcattcagttgcagttctcttcaatgctggacacacggtttccaaggatcaaagtcttgaggagtgctagatcaggaaatgggagaagcaaggcaaggagaagagggcatcaggagttggaatttctgaaatgtgcatttatctcacagaaggcttggcacaatgaggctggggtgagtgtggttttagtgattgttctttgttgcctccttagctgcagcaatcagtggagtgaggctggagaggggcttggcaatcttcaggaattgatgctgtagcagctctttagctgaacctctcttctccacatccatctcgagacagcggttcagaaagtcccggaagatagctgacagcttctctgggttctgaagttctggggtcccattggtggcaatgaggt

SEQ ID NO: 2151 - DNA, 408 bp, Homo sapiens
  misc_feature 15, 212, 401: n = A,T,C or G
actattgacccagcnatgggggcttcgacatgggctttagggagtcataagtggagtccgtaaagaggtatctttactataaaagctattgtgtaagctagtcatattaagttgttggctcaggagtttgatagttcttgggcagtgagagtgagtagtagaatgtttagtgagcctagggtgttgtgagtgtaaattagtgcgatgagtangggaagggagcctactagggtgtagaataggaagtatgtgcctgcgttcaggcgttctggctggttgcctcatcgggtgatgatagccaaggtggggataagtgtggtttcgaagaagatataaaatatgattagttctgtggctgtgaatgttataattaaggagattttgtagggagattagtatanagaggta

SEQ ID NO: 2152 - DNA, 424 bp, Homo sapiens
  misc_feature 414: n = A,T,C or G
atttttatattatttatttattcttcgttagtttgtttttggagcgtgggttttgttttgttttttgatttttttctttttttcgacctacggatttattcttattgcccaggcttgagtgcagtggcgtgttctcagcttactcaacctccgcctcttgggtttgggtaattgttgtgcctcggcctccctctgcctcttgggcttgggcgattgttccacctcatccgccctccgcctcttgggtttcggtgattgttccacctcatccaccctccacctcttgggtttgggtggtttttccgcctcggcctcctgagtagctaagggaggagtcttgagattatcatccactgagggtggaagaggagagggtggaagagggacaaagagacagtccttcagattatcatncactgagggt

SEQ ID NO: 2153 - DNA, 204 bp, Homo sapiens
  misc_feature 150, 151, 167, 168, 190: n = A,T,C or G
caaagactgccttcctgcaccaagtaaagaagtgactcttgaaatactgggtggaatttctttatccaacataggaccgatgcgctcgcagatttgcaaaagatgatcaggagccacatgcttattggacaagaccaactcctcgtagcnnctgttgtgctcgttgnnctcccagtccaatctcttcggnaacaactggtacct

SEQ ID NO: 2154 - DNA, 234 bp, Homo sapiens
  misc_feature 11, 12: n = A,T,C or G
acagctgtgtnntaaagatgccttctggtgaatttgcacgtatatgccgagatctcagccatattggagatgctgttgtaatttcctgtgcaaaagacggagtgaaattttctgcaagtggagaacttggaaatggaaacattaaattgtcacagacaagtaatgtcgataaagaggaggaagctgttaccatagagatgaatgaaccagttcaactaacttttgcactgaggt

SEQ ID NO: 2155 - DNA, 159 bp, Homo sapiens
  misc_feature 6, 7, 77: n = A,T,C or G
tgaggnncccccctcagctcctggggctcctgctactctggctccgaggtgccagatgtggcatccagatgacccantctccatcctccctgtctgcatctgtaggagacagagtcaccatcacttgccgggcaagtccgaccattagcagctatttaa

SEQ ID NO: 2156 - DNA, 327 bp, Homo sapiens
  misc_feature 9, 10, 181, 223, 262, 306: n = A,T,C or G
acagattgnncacatatctagtctcatcaaactctccaaggccgacgtggaaaggaaattatcacagatgattcttgacaagaaatttcatgggattttggaccagggggagggtgtcctgattattttcgatgaacccccagtagataaaacttacgaagctgctctggaaacaattcanaacatgagcaaagtagtggattccctctacaacaaagccaanaaactgacatagagttggatctgtagcggtcctttgganagtgtgtgtggccgggagagtgaaaccttgggggaaaatgctangagattcttttttctttttgt

SEQ ID NO: 2157 - DNA, 62 bp, Homo sapiens
cgttgccctgctgatttgctgatacgcccattattgatgtttcgcgcccctatcgagtttga

SEQ ID NO: 2158 - DNA, 341 bp, Homo sapiens
acagggtttactctcagaaacctacctggaagcccatcggatcgtgaagatgaacaagagtgaggatgatgagtctggggctggagagctcaccagggaggagctgaggcaaattgcagaggaggatttctacgaaaagctggcagcttcaatcgccccagaaatatacgggcatgaagatgcgaagaaggcactgctgctcctgctagtcgggggtgtggaccagtctcctcgaggcatgaaaatccggggcaacatcaacatctgtctgatgggggatcctggtgtggccaagtctcagctcctgtcatacattgatcgactggcgcctcgcagccagt

SEQ ID NO: 2159 - DNA, 274 bp, Homo sapiens
  misc_feature 13: n = A,T,C or G
accattcccagantttcaggggcatcgtgggtttggtctagtgattgaaaacacaagaacagagagatccagctgaaaaagagtgatcctcaatatcctaactaactggtcctcaactcaagcagagtttcttcactctggcactgtgatcatgaaacttagtagaggggattgtgtgtattttatacaaatttaatacaatgtcttacattgataaaattcttaaagagcaaaactgcattttatttctgcatccacattccaatcatattag

SEQ ID NO: 2160 - DNA, 585 bp, Homo sapiens
  misc_feature 572: n = A,T,C or G
gctgcccaggccacttacagtggtctggagagccagtcagtgagtggctgttacggggccggctacagtgggcagaacagcatgggtggctatgactagttttgttaggaacatttgagttacttcaatcattttcacaggcagccaacaagcaattaagagcagttataatagaggaagctgggggacccattttgcaccatgagtttgtgaaaaatctggattaaaaaattacctcttcagtgttttctcatgcaaaattttcttctagcatgtgataatgagtaaactaaaactattttcagcttttctcaattaacattttggtagtatacttcagagtgatgttatctaagtttaagtagtttaagtatgttaaatgtggatcttttacaccacatcacagtgaacacactggggagacgtgcttttttggaaaactcaaaggtgctagctccctgattcaaagaaatatttctcatgtttgttcattctagtttatattttcatttaaaatcctttaggttaagtttaagcttttttaaaagttagttttgagaattgagacacantactaatactgta

SEQ ID NO: 2161 - DNA, 268 bp, Homo sapiens
  misc_feature 14, 50, 110, 111, 165: n = A,T,C or G
actgccggctggtnaatggaacctcgcagtcatttatcatcagacctcangaagaaggtgaacgggctttgccatcaataccaaagttggccaacagcgaaaagcaaggnntgcggacacacgccgtctctgtgtcagaaacagatgattatgctgagattatanatgaagaagatacttacaccatgccctcaaccagggattatgagattcaaagagaaagaatagaacttggacgatgtattggagaaggccaatttggagatgt

SEQ ID NO: 2162 - DNA, 171 bp, Homo sapiens
  misc_feature 13: n = A,T,C or G
acttcccctggantaaaaacaggaaatacaatttatgtttatacgtggttttagatatgactcaatatacatagattttaactttatggtttggtattacttttttaaaggagctcaatagaaattcaaatctcactttaagaccatgaatttcaagttgcaatgaagtgt

SEQ ID NO: 2163 - DNA, 223 bp, Homo sapiens
  misc_feature 5, 57, 108, 109, 125: n = A,T,C or G
ttccnttaaaaactactacttgagaaagaaatctttccacaaatagcataaaactgnagaatgatgaaaggatttgggaaagctttacaaaagcttaattccaattgnntcttcctgagggcggnggcaaagggtatttccttccttctctgggatatccctgtctccctccacgatcatctcgttctgggtggatacccaccaggcccagctagcatctggt

SEQ ID NO: 2164 - DNA, 529 bp, Homo sapiens
  misc_feature 31, 133, 283, 361, 405, 464, 494, 500: n = A,T,C or G
acacacacatggggaacacgccacagcttanatgtgacaaagttccttctcatatgactgttccctcaaggtaagactaagatgggagggggagaaaaagaatcctaaaaaagccaatttttaaaaattctgntttggctgattttgtgctataatgggtagctgatttctaaaaatcatatttcttcaaagagttttatatcgaaaggaagactaaatgtaatgtgcctttccttataatccaggaaaacaactgtggtatttcaaaaattctaaaaatatntactttcatgaaatagtaactatttcactacaaacctatttttcactaaatacacacatttcctaatcctggagcctnctgggaaaagcagtgggttctccctgggtcttgcaagactccantgttcacaggagagtgtggggaatagcttcaccccgtctcctgggatgggctttgtcanaggtcacgtgcagagacgctatcagacttncaccangcatgtttaagcaattaccccatacttgt

SEQ ID NO: 2165 - DNA, 277 bp, Homo sapiens
acaccaggggttggaaaaaccacactaggcaaagaacttgcgtcaaaatcaggactgaaatacattaatgtgggtgatttagctcgagaagagcaattgtatgatggctatgatgaagagtatgactgtcccattttagatgaagacagagtagttgatgagttagataaccaaatgagagaaggtggagttattgttgattaccatggttgtgatttcttccctgaacgctggtttcatatagtttttgtgctgagaacagataccaatgtattgt

SEQ ID NO: 2166 - DNA, 231 bp, Homo sapiens
ctggcttgtgatcataatgccaactatagataaggcaagtagtagcctagtagttaactgaagtttcaagttagtcatgtatagtcagtttttattatcatgtgaataaaataaaattgttttccttttcttttcattcagaaaagttctaggaactattttggtgcacaaccacattatagattatgcttgggtgatatgccatttgtagctgggaaggtgagttggtca

SEQ ID NO: 2167 - DNA, 350 bp, Homo sapiens
acagtaaaattaacacttccgttacaggaaatgtatgacgcaaataatataaaattaaaaggtgaaaaaaaggtgacactggtttcctaagatacaatttactctttacaaccagggtccacaggtccaggctgcagagcggcagcaggaagcagagcctcccacctgcttctgggggacctggtaataaaaatcagcccatgatggcgctatggcctctcagacaccacacgctgcctaaacacctagagctctggaaatagtcaacaggagagtgatttccatgggggaaattttaaataagatgcacatgggacaggcgatagaaagtttgccaagttaaatttggt

SEQ ID NO: 2168 - DNA, 406 bp, Homo sapiens
ttcccaagtgttttcattcagtgatcaggactgaacacagaggactcaccatggagtttgggctgagctggattttccttgctgctattttaaatggtgtccagtgtgaggtgcagctggtggagtctgggggaggcttagtaaagcctggggggtccctaacactctcctgtgcagcctctggattcactttcagtgacgcctggatgagctgggtccgccaggctccagggaaggggctggagtgggttggccgtattaaaagcacaactgatggtgggacaacagactacgctgcacccgtgcaaggcagattcaccatctcaagagatgattcagaagacacgttgtttctgcaaatgagcagcctgaaaaccgaggacacagccgtgtattactgtacctg

SEQ ID NO: 2169 - DNA, 57 bp, Homo sapiens
  misc_feature 13: n = A,T,C or G
gtacaagcttttnctttttttttttttttttttttcccttttttttttttttttttt

SEQ ID NO: 2170 - DNA, 320 bp, Homo sapiens
accagctgaatagcccagcttgcagtatagttatgtttcagtctgcagtgtgtttagcattcccttgtcaaagtgcttgactgcatgctggaaactttgtatttttgaagcggcaaactctgttctctggaatgctctgaagttatggctgggacctatcccctcacatctaatgaatgaattataaaatgtatatgtctatgaagcttcggggtagtgcctgtaatcagaaaacaacttagaacccttttgtttgtttccaattgagtcattactgcctgccactaagaaacgtgcttgaatctaataagtatgtgtgt

SEQ ID NO: 2171 - DNA, 186 bp, Homo sapiens
acagccgccttctaggccgtaacggaattcctgaaggttggagactccatagaagtggacaaaggctgctgccaccaccaggacatggaaaatctgatgagactggaaccatatgtcaaattttccaggaaagaagcgctcaggaattcgagcagcataaaaggccagctccagtgatgtacctcg

SEQ ID NO: 2172 - DNA, 275 bp, Homo sapiens
  misc_feature 104: n = A,T,C or G
cagctatctaatgattgccctgacggtggtaggatgcatcttcatggttattgagggcaagaaggctgcccaaagacacgagactttaacaagcttgaacttanaaaagaaagctcgtctgaaagaggaagcagctatgaaggccaaaacagagtagcagaggtatccgtgttggctggattttgaaaatccaggaattatgttataacgtgcctgtattaaaaaggatgtggtatgaggatccatttcataaagtatgatttgcccaaacctgt

SEQ ID NO: 2173 - DNA, 565 bp, Homo sapiens
acttgaaacctagagttgcgttttcacttgagaagacacactttggaaacacctatccaacagactacaaatataggctattaaattaaaaatctggtttcaaaataatacccacttaggttggaaatatctttctccaaactcagatccaacttttgaattgtttggtatcaaaggcaaagttagagggacttgggtttaaaaactaaaattacaagtgagtgcttaaaaaaaaacaactcaaaacatctttttatcaaataagggacacacacacacaaaaggcaaacgatgatatctacatgcttggactgggagagcagctcccaggctcccctggagggatgttctctcaaacctcagtaaactgagtttgtcattgaactttgaacctggtagtgagctcagcaatctacctggtccaagtcccccattttagaggtgaagaaattgaagtccacagcgactttgtccagggtgaaaagcagagccagggcacagcccagatgctcagcccacccagagcccttctgagacatcacactgtggtcacacgacggcagct

SEQ ID NO: 2174 - DNA, 337 bp, Homo sapiens
acaggttatcttcagtgtgtcttggcggatgagttgtgtcagtgctacaatggagttctcttgtccacggagagcagtgttgcagtgtatggaatgctaaatcttaccccaaagggcaagcaggctccaggtggccatgagctgagttgtgacttctgggaactaattgggttggcccctgctggaggagctgacaacctgatcaatgaggagtctgacgttgatgtccagctcaacaacagacacatgatgatccgaggagaaaacatgtccaaaatcctaaaagcacgatccatggtcaccaggtgctttagagatcacttctttgatagggggt

SEQ ID NO: 2175 - DNA, 224 bp, Homo sapiens
acaacaaggggatcatgggtgaagacacctacccctaccagggcaaggatggttattgcaagttccaacctggaaaggccatcggctttgtcaaggatgtagccaacatcacaatctatgacgaggaagcgatggtggaggctgtggccctctacaaccctgtgagctttgcctttgaggtgactcaggacttcatgatgtatagaacgggcatctactccagt

SEQ ID NO: 2176 - DNA, 58 bp, Homo sapiens
  misc_feature 23: n = A,T,C or G
actataaaaagatttggctacanatacaaaacatctttgcgataaaactgacaacgta

SEQ ID NO: 2177 - DNA, 222 bp, Homo sapiens
acgaatttgggtcccagccttgttgggttgtcagccatggacatggatttcaacccctggagaaaacgatgtcattgttcagcagctgagagcccaggcgtccgcggcgacttgccgtctctccattccactgcctgttgcagagtttttctgtaactaagggggttgaggttattgtagacgttagattgcgggcaccgccagggattttgcagcgcttca

SEQ ID NO: 2178 - DNA, 244 bp, Homo sapiens
  misc_feature 19: n = A,T,C or G
actgcaatcacaatgccanatggtgtttatgggctatttgtgtaagtaagtggtaagatgctatgaagtaagtgtgtttgttttcatcttatgaaaactcttgatgcatgtgcttttgtatggaataaattttggtgcaatatgatgtcattcaactttgcattgaattgaattttggttgtatttatatgtattatacctgtcacgcttctagttgcttcaaccattttataaccatttttgt

SEQ ID NO: 2179 - DNA, 264 bp, Homo sapiens
accttgagctcctcaaagactcactcaacgagtatgcatatgcagcagagctagcgggcttgagctatgatctccaaaataccatctatgggatgtatctttcagtgaaaggttacaatgacaagcagccaattttactaaagaagattattgagaaaatggctacctttgagattgatgaaaaaagatttgaaattatcaaagaagcatatatgcgatctcttaacaatttccgggctgaacagcctcaccagcatgccatgt

SEQ ID NO: 2180 - DNA, 371 bp, Homo sapiens
ttctgaatgtctgaagaaactgcaaaagtgcaattccaaaagccaaggtgagaaagaaatgtatacgctgggaatcactaattttcccattcctggagagcctggttttccacttaacgcaatttatgccaaacctgcaaacaaacaggaagatgaagtgatgagagcctatttacaacagctaaggcaagagactggactgagactttgtgagaaagttttcgaccctcagaatgataaacccagcaagtggtggacttgctttgtgaagagacagttcatgaacaagagtctttcaggacctggacagtgaagggagcccgggcagccaccgtctccagagccctgggcagcattttccagcaagatgt

SEQ ID NO: 2181 - DNA, 408 bp, Homo sapiens
cacgcacaggctgaggccaggcatctggtatatgaatcagacaaaaacaaggatgagaagctaactaaagaggaaatattggagaactggaacatgtttgttggaagccaagctaccaattacggggaagatctcacaaaaaatcatgatgagctttgatagacactcaccagaatatggcagactgtcataggcattctgttattgtcttggattgttgctacaattgtctaatttacagcagttgtgatcccacaaaaagcaagtttatacctcagattggggtataaaaattgtttttcgctcagtatttactggaaaatggacatcactagtctttcagtaagatttctctcaaaacacgtgaaaaccttggtaaattgcaattctttctggggatatattggt

SEQ ID NO: 2182 - DNA, 329 bp, Homo sapiens; identical to SEQ ID NO: 1146

SEQ ID NO: 2183 - DNA, 299 bp, Homo sapiens
accctccctcacacttgggaagatctccatgaaaaagataagagcacgaactgctttggagataatgatcctattgatgtttgcgaaataggctcaaagattctttcttgtggagaagttattcatgtgaagatccttggaattttggctcttattgatgaaggtgaaacagattggaaattaattgctatcaatgcgaatgatcctgaagcctcaaagtttcatgatattgatgatgttaagaagttcaaaccgggttacctggaagctactcttaattggtttagattatataaggt

SEQ ID NO: 2184 - DNA, 602 bp, Homo sapiens
  misc_feature 522, 546, 570, 579, 585: n = A,T,C or G
gtggagaaagcggctctgggtctagattgagggatactccccctttccaccatgggcaagaagggcaaagttggcaagagccgacgagacaagttttatcacttggcgaaggagacgggttaccgttcccgatctgctttcaagctgatccagctcaatcgccgctttcagttcctgcagaaagcccgagccttgctggacctgtgtgctgcgccagggggatggctgcaggtagctgccaagtttatgcctgtatccagccttattgtgggagtggacctggttccaatcaagcctctccccaatgtggtgactctccagcaggacatcacaacagaacgttgtaggcaggccctgaggaaggagctgaagacctggaaggttgatgttgtgctcaatgatggggcccccaacgttggggctagctgggtccatgatgcttactcacaagcccatttgacactgatggctctacgtttggcttgtgactttttggcccgtggtggcagcttcatcacaaangttttccgttctcgtgactatcancctctgctatggatctttcagcanctgttccgncgtgtncaggccaccaagcccca

SEQ ID NO: 2185 - DNA, 293 bp, Homo sapiens
  misc_feature 214: n = A,T,C or G
aatcacttgcccatcatctctgcgggcagcgaactgtgtctacagcaacctgtggagcggaaactgtgatctgccctagcgctctcttccagaagatgccctccaatcctttccaccctattccctaactctcgggacctcgtttgggagtgttctgtgggcttggccttgtgtcagagctgggagtagcatggactctgggtttcatatccanctgagtgagagggtttgagtcaaaagcctgggtgagaatcctgcctctccccaaacattaatcaccaaagtattaatgt

SEQ ID NO: 2186 - DNA, 347 bp, Homo sapiens
  misc_feature 11, 51, 146, 160, 228, 249, 253, 263, 273, 274, 283, 284,298, 299, 313: n = A,T,C or G
acttttatatnatgattttttaaatgcccaaaggactagtttgaaagcttnttttaaaaagaattcctctaatatgactttatgtgagaagggataatacatgatcaaataaactcagttttttatggttactgtaaaaagactgngtaaggcagctcancaccatgcttctcgtaaaagcagcttcaattatccactggggttatcttttgacaacttgccattatntgatgttacacaattcaatancaancaagtttganacaatcgcannttaaaagcnngaaccatttaacannaagtggaataattnaagataaagcacttcttcccaaagggaattatca

SEQ ID NO: 2187 - DNA, 221 bp, Homo sapiens
  misc_feature 19, 20, 21, 147, 150: n = A,T,C or G
cgatgtactaccaaatgannnagtttaaatgcttgtaacaaacgtgttatccaaaacagcacaatatgatgatgctaagacttacaaaattaacctaatttacagtattgtcaaacatgatttcatacaaacttgaataaacaccgnatntaaactaggtcaaacaactaccgagttcaaataattgatatggaagtattttggtaaagtgcccatagtga

SEQ ID NO: 2188 - DNA, 198 bp, Homo sapiens
aactggctttaccaatcttgaaatttgaccacaagtgtcttatatatgcagatctaatgtaaaatccagaacttggactccatcgttaaaattatttatgtgtaacattcaaatgtgtgcattaaatatgcttccacagtaaaatctgaaaaactgatttgtgattgaaagctgcctttctatttacttgagtcttgt

SEQ ID NO: 2189 - DNA, 129 bp, Homo sapiens
actggccggggtcggcctccatgttcaggttctcaatgtgtagctctgaccggccctgcgaggaactcacgaagaacctgttctcggagccgttcatgagggccttgtcctcagagtcagtgatcttgt

SEQ ID NO: 2190 - DNA, 473 bp, Homo sapiens
  misc_feature 44, 120, 121, 148, 165, 229, 240, 261, 279, 281, 290, 347,423, 436, 441, 470: n = A,T,C or G
acacaatggtttattaaaggaatgtatggcccacatcaacctancaaggattctactggtaaaccttcctatggccaaaggaaaaacaagcaggagttgagtggctggggtggggtgcanncaatggagagagggcagaagggtgtanaagctgaaggggtctanaagcttactcctgagtttcttccttctgtcttcaaatctttacttcttatggccaaagacccanctgtttcatangctggagatgcactcttctanactgctcgagacagccananacaggggangagggaagaaggatactgtggaaagggatggcggggcaaacatttagagctagaagncactactgggccaatgctaaagtttctgtctctaagcctaaaaaagccagtgtagtagggcccttatcactcttantttgctaggtttnccctntgaaataatgagcagatttagccaggctngca

SEQ ID NO: 2191 - DNA, 334 bp, Homo sapiens
  misc_feature 9, 116, 137, 187, 188, 264, 287, 290, 292, 301, 302, 307: n = A,T,C or G
atctatggntgccatctgcagattcttaaaatacaagatgaggatttcctcacacacaacttagtgggaactttccatgttctgttaagcctttcggtgtttttttgatctgtgtncttttttttttaaatagcagnaatccaactttaaaaaaatgcagcactaaaaaaataactagtccttattnncatgcaggactaactgcaggcagcacatttgtatcttgcttaagttgttgactttggagtcaagtttttattacangtgtcatgattgccaatactgtnttntntaagtgaannatggntgctttgactttggatctaatcaagat

SEQ ID NO: 2192 - DNA, 163 bp, Homo sapiens
  misc_feature 1, 17, 27, 85, 98, 136: n = A,T,C or G
ntactggctgtggactntccagggacncctcctgcagaagaacaacaaggaccgcttctgccagctgctgtggcggccccggccncccacactcctgngccaggaacagatcaagcaaattaaaaaggatctgaanaaatactctaagatctttgaacagaag

SEQ ID NO: 2193 - DNA, 362 bp, Homo sapiens
  misc_feature 6, 8, 295, 358: n = A,T,C or G
ccagancnacctataacagaccaagacacgacatctagccctgaatctgcaggaaaaatccaagctggagagtgagctagccaactttgggcctcgcattaatgatatcaagaggatcattcagagccgagagagggaaatgaaagacttgaaggagaagatgaaccaggtagaggatgaggtgtttgaagagttttgtcgggagattggtgtgcgcaacatccgggagtttgaggaagaaaaggtgaaacggcagaatgaaatcgccaagaagcgtttggagtttgagaatcangaagactcgcttgggcattcagttggatttttgaaaagaaccaactgaaggaggaccaagatnaagt

SEQ ID NO: 2194 - DNA, 205 bp, Homo sapiens
acccagtgcaggaagagtttccacaccagggggaattgtattctgcatggcaaaatccacacaggagagacaccctatctgtgcggccagtgtggaaaaagcttcacccagagagggagtctggctgtgcaccagcgaagctgctcacagaggctcaccctttgaccactttcctgaagagaagttctctttatgaattaagagt

SEQ ID NO: 2195 - DNA, 317 bp, Homo sapiens
  misc_feature 11: n = A,T,C or G
acagtggaaancatctttcatgtttccttcattatacgggatggttttgcaagaataagacttgaccaagaccgactgccagtaatagagcctgttagtattaatgaagaaaatgagggatttgaacataacacacaagttagaaatcaaggaattatagctttgagttaccgtgactgggaggagattgtgaagacctttgagatttcagagcctgtgattactccaagtcagaggcagcagaagccaagtgcttgatgctagctgaaggactcaaatggatagtgaagtccaaaacggaaagcggcatgtattgt

SEQ ID NO: 2196 - DNA, 343 bp, Homo sapiens
acaaccagaaaatagtgtgggatattgaattatgggaggctctgactgtctcgggtgtcagcttaacattccacagatggggggttagtttttatatcctataatacaaagcatattaaatggcaatatggagtcagtcctgcatttaatgtcttgaacattttaaattacttctattaccatgttgttttttagtagaattgtttcctaaagaaaaccactctttgatcatggctctctctgccagaattgtgtgcactctgtaacatctttgtggtagtcctgttttcctaataactttgttactgtgctgtgaaagattacagatttgaacatgtagtgt

SEQ ID NO: 2197 - DNA, 252 bp, Homo sapiens
  misc_feature 6, 8, 14, 17: n = A,T,C or G
cagagncnccaaanatnacactaatataatgtatgggaaggcgtaatataaaaggcctccaccaactgcctgaagcacggttaaaattgggaagaagtaaagtgcagcataaatacttttaaatcgatcagattcccctaacccacatgcaatcttcttcaccagaagaggtcggagcagcatcattaataccaagcagaatgcgtaatagataaatacaatggtatatagtgggtagacggcttcatgagt

SEQ ID NO: 2198 - DNA, 204 bp, Homo sapiens
  misc_feature 12: n = A,T,C or G
actttaggaccntgacagacaaatcgattacaaggtcaattcccaggatttcttcagggtgtgttcaggagtgcagatgttctttggatgacctttctactaaattagacctctgaaggagaaagctacttgccagaggctttccctgagagcattaggttgggcaaaatctgactaaaatttaattactaaatgaaagtgtgt

SEQ ID NO: 2199 - DNA, 304 bp, Homo sapiens
  misc_feature 164, 175, 176, 249, 250, 275: n = A,T,C or G
gtaccttgtgaaacaatttgtttactgaataaaaaatattgcttaagatttaaagcaattaaagcaaaataagttgctgaagggagatcatatgagttaaatacaggcttttttttaatctgtaattgatttacatttgattttaagaagacactgtttacatnaggtcaccacnnagcagatttacatacaaccttcaattgcggaaaaacaaagtttctttttgatccaaacacaaagaaaaacttnnttgtgttttttttaatgatcttttncttgatcataaaaaaaagtaaaaaatgca

SEQ ID NO: 2200 - DNA, 522 bp, Homo sapiens
ccgcatcctagccgccgactcacacaaggcagagttgccatggagaaaattccagtgtcagcattcttgctccttgtggccctctcctacactctggccagagataccacagtcaaacctggagccaaaaaggacacaaaggactctcgacccaaactgccccagaccctctccagaggttggggtgaccaactcatctggactcagacatatgaagaagctctatataaatccaagacaagcaacaaacccttgatgattattcatcacttggatgagtgcccacacagtcaagctttaaagaaagtgtttgctgaaaataaagaaatccagaaattggcagagcagtttgtcctcctcaatctggtttatgaaacaactgacaaacacctttctcctgatggccagtatgtccccaggattatgtttgttgacccatctctgacagttagagccgatatcactggaagatattcaaaccgtctctatgcttacgaacctgcagatacagcttctgttgct

SEQ ID NO: 2201 - DNA, 282 bp, Homo sapiens
  misc_feature 14, 219, 270: n = A,T,C or G
actgaggaaatctnttgtaaagtgagctttgggtataacttagccccatcattatttagagaatagaggaggaagaaagaggaaggattttaaaggcagacaatgacagaccattcaggataggtggggttttaaagggagataaacacagtctcatcaactaaggagagatttgctgcagtaaataggatgagggaaatagtctgtgggatgcaagcnaaggaagcagggtgccttagacactgagtggagccagaaagatcatgcggnctttttccaagt

SEQ ID NO: 2202 - DNA, 217 bp, Homo sapiens
  misc_feature 13, 14, 90, 189: n = A,T,C or G
acctattttgganntagacttgaaaagaaagtgctagcacagtttgtgttgtggatttgctacttccatagtttacttgacatggttcanactgaccaatgcatttttttcagtgacagtctgtagcagttgaagctgtgaatgtgctaggggcaagcatttgtctttgtatgtggtgaattttttcantgtaacaacattatctgaccaatagtac

SEQ ID NO: 2203 - DNA, 597 bp, Homo sapiens
acactgattcagtatccacagtccagaaggagttcttgaacatctagttcatatccccaaaaaatgtgaaaagactcctaaacacccaagttattacacaatgggaagctgatattggcttgtattaaaatccaggtgaatatcaaacataatcacagccttaacagtggtgctagaataagtgatgacaatatgtgcacagctgtatacagatcactattaaacacaggaacaaaatgccacttgatgcatatcaaaaagccaatttgaatatatttatttcatttacattgatacagtattagaagggactgaatataattatggagactgctgcaaacatttgatgccactaagtattctattaagcatcaggcatgcacagtagttaccttttaaagtttctcatgtatatatcttaacacatatatcttaagctacaatatgtttaaagcatttagtcattttaaacccaaatattttaattgacctatgtctaaatggagaaaaacagaaacttcctcctgtctcaatacccgatggcaatattaaaccttactccccaaattgatatttaaacttatttatgtcatcttt

SEQ ID NO: 2204 - DNA, 259 bp, Homo sapiens
acgtgggtgaggggatggaggaaggcgagttttcagaggcccgtgaagatatggctgcccttgagaaggattatgaggaggttggtgtggattctgttgaaggagagggtgagaaagaaggagaggaatactaattatccattccctttggccctgcagcatgtcatgctcccagaatttcagcttcagcttaactgacagacgttaaagctttctggttagattgttttcacttggtgatcatgtcttttccatgtgt

SEQ ID NO: 2205 - DNA, 465 bp, Homo sapiens
  misc_feature 10, 11: n = A,T,C or G
acaactattnnattagtcttctactgccctacagctacagagcaggcacctctgtgggcatatattgcttgtgcctgtggccttttcatttaccagtctttggatgctattgatgggaaacaggcaagaagaaccaatagtagttctcctctgggagaactttttgatcatggctgtgattcactatcaacagtttttgtggttcttggaacttgtattgcagtgcagctggggacaaaccctgattggatgtttttttgttgttttgcggggacatttatgttctattgtgcgcactggcaaacgtatgtttctggaacattgcgatttggaataattgatgtgactgaagtgcagatcttcataataatcatgcatttgctggcagtgattggaggaccacctttttggcaatctatgattccagtgctgaatattcaaatgaaaatttttcctgcactttgt

SEQ ID NO: 2206 - DNA, 379 bp, Homo sapiens
acagaattgccaagggttaccagacctctccagatctgcgattgacctggttgcagaacatggcaggcaagcactcagaacgaagcaatcatgctgaagctgcacagtgtctagtccactcagcagcacttgttgctgaatatttgagcatgctggaggaccggaaatatcttcctgtgggatgtgtaacatttcagaatatttcatctaatgttttagaagaatctgcggtctcagatgatgtggtatctccagatgaagaaggtatctgctctggaaaatactttactgagtcaggacttgtgggattactggaacaagcagctgcttccttctctatggctggcatgtatgaagcagttaatgaagtttacaaagt

SEQ ID NO: 2207 - DNA, 101 bp, Homo sapiens
  misc_feature 9, 10: n = A,T,C or G
acctgctgnnagtctgcctatgccagaaggattaaggaggggaggttacccaagaaacaaagcctacatgccgcttacagcccccgttggatggttgctca

SEQ ID NO: 2208 - DNA, 255 bp, Homo sapiens
  misc_feature 22: n = A,T,C or G
acaatgaattcctcgatttttnaaggctgaccctgtttccttggttaacaatttcaatttaggccttataggaaaaaacgtaagggatcctttatctgcctccaactaggtaagttatttgataccactgacagcttaaaaagtaatgtcctaacctttctgaagattctggttgccataaccatgctactacagtctgttgttagtttgctctattaaaactaattggtctggagaaaacctacctgcagttgt

SEQ ID NO: 2209 - DNA, 550 bp, Homo sapiens
  misc_feature 12, 472, 488, 495: n = A,T,C or G
accaactctaanccacactggactaattcagatggagggatactttccaaactaatcagatgcctaataaagtgttggagtatacgtgtggacatgtagaagggatagttgcgaatgtctgaccttgtggaaatttccaaagatgtctacccataaacggtaattggcagtgttcatgactgaattaaatttagtcttttaaatcttgtcagacaaggatcccagagtgattctggcacatcactcttcttatggataatctaccaccagaagataaacctcagtaaatctgagatagttttaaaattacaagaatatttagaaacttcaagtgagtaagtatataaaatgtaagctggaaaaagcagcctttgaaatgagacactagaatatctttggtagataaaaactctattatttcaaggagagagtttttgtttctggaaagtgctaagtttgtgtaacataaaangcattactaaattcangtgacanggtaaaagaatattttttttaagaaataataaaaccatgcatattggattcctaa

SEQ ID NO: 2210 - DNA, 357 bp, Homo sapiens
  misc_feature 334: n = A,T,C or G
tacccccacaaaatctgcattgtccatgtgagtaaagtaaaataattcctgttatttttttctgttagaaataagtatggaggatatgtttttaaaaatttatgagttaattgaaatatccatatataacaagtgactttctcacaatatatatgatgtgatatatagggagatagtttcactttcatcatattttatacgttgattctgaactatagaaaaataataaatgggattttaattatagctcttagttgggaaagaaatatagagagatgtgggatttgaatgcccatgaaagacattttattttacttgaatatattcttgcttnactttaccctccataatatgttg

SEQ ID NO: 2211 - DNA, 387 bp, Homo sapiens
  misc_feature 13, 333: n = A,T,C or G
acttacgctatcntcagaatataaagaactgcctcaaaatagaaggccatttagctgtgcagcctactttcactgaaggttcattgtttttcctgttacatggagaagaatgtgcccagaaaataagagctttagttgatcaccatgatgcagaggtgaaggaaaaggttgtaacaataatacccaaaatctgattggtcatatttttccaaagagtaatgcagtctggatataaatgtattttctgtcttccttataaggggattctcccagctgctaaatttaaacagtaaatatcacattttgtcattaacacagctataacttgccgtngttctcaggatttattttggactattttgatgccaagtgaatataagagtttgt

SEQ ID NO: 2212 - DNA, 276 bp, Homo sapiens
  misc_feature 190, 191: n = A,T,C or G
acctagcataaaaactctgcagagaagtattcccaataaggaaatagcattgaaatgttaaatacaatttctgaaagttatgttttttttctatcatctggtataccattgctttatttttataaattattttctcattgccattggaatagatatctcagattgtgtagatatgctatttaaataattnntcaggaaatactgcctgtagagttagtatttctatttttatataatgtttgcacactgaattgaagaattgttggttttttcttt

SEQ ID NO: 2213 - DNA, 268 bp, Homo sapiens
actcctcgggcaacagccttttcaccagctcaaatccaaacttgcggatgagcttggtgaacaggttccgaagcttcatgcggaagtgccgccgcatgtcatctgaaagcttcccaatggcttccatcaccagctgcacatgtttggccaggtgcgccacgtccatgacagtcactgccaccttgatgaagcccagtgcagacttgaccacgtcacgggtgcgggaggccagaagcaggcacacattctccagcagctgctccactgt

SEQ ID NO: 2214 - DNA, 507 bp, Homo sapiens
  misc_feature 13, 14, 403, 488: n = A,T,C or G
acaaaaggcttanntaagttttctttgctgaatttgatggatgtttttctgttgtgtaatctgatatgccagtttgcttaaaacatttgccaacacattatgaagttattaaatttaagggacagaggtagtatagttagatatactttctcttaggaaaaataatgggcaaaaatttttgttgcaacttttcatatatattttccccttaccaattgttttatccttatagtattgtaggccctgaaagtagaatttttctttaacttattttgagatttgagatttaaattttatgtattgtttacagtcagagtaaatcactggatttcttttgtttgttttgatttgctctgttttattcagtcaaatctagagttcgaatcctctgctaaagaatttncatccactggtgtaaacagtgaaaggtattttgcttgttgaaaaaaaaaactggcaaagtgaaaagatacagtcaaaaaatctanaatttctttaattttgctt

SEQ ID NO: 2215 - DNA, 126 bp, Homo sapiens
acagaaggggaaagactttaagcaaccatgatgaccttggaaactggttatgtgccttatttaacatataattataattaaagttaactaaagtctattccatcttcctttactatggttgcaagt

SEQ ID NO: 2216 - DNA, 290 bp, Homo sapiens
  misc_feature 15, 16: n = A,T,C or G
acacataaagtttannctggttatgacaaaagcctatagttgtgtttcttgaactataaagaaaacaaattttggcagtctttaagtatatatagcttaaaatataatttttagcatttggcaccatatgtatgccattatatttgattttgcattactgtttcacaatgaagctttctttaaggctttgatttttatgattatgaaagaaataaggcacaaccacagtttttctttcttaaatttcatcactgttgatgtggttcttttgtgttaaaaaaaagtgcaac

SEQ ID NO: 2217 - DNA, 333 bp, Homo sapiens
tgattgatatccagaccaggatggctgggcgagcattggagcttctttatctgccagagaataagccctgttacctgctggatattggctgtggcactgggctgagtggaagttatctgtcagatgaagggcactattgggtgggcctggatatcagccctgccatgctggatgaggctgtggaccgagagatagagggagacctgctgctgggggatatgggccagggcatcccattcaagccaggcacatttgatggttgcatcagcatttctgctgtgcagtggctctgtaatgctaacaagaagtctgaaaaccctgccaagcgcctgt

SEQ ID NO: 2218 - DNA, 335 bp, Homo sapiens
  misc_feature 60, 61, 199, 298: n = A,T,C or G
acaaaaaaaaccttacataaattaagaatgaatacatttacaggcgtaaatgcaaaccgnntccaactcaaagcaagtaacagtccacggtgttctggccaaagacatcagctaagaaaggaaactgggtcctacggcttggactttccaaccctgacagacccgcaagacaaaacaactggttcttgccagcctctanagaaatcccagaacactcagccctgacacgttaataccaaggggaacagttaaccttcaatacaaggtcaaaatcagcaacaaagttctacaatccagngctgatatcagatacaagcttcaaggacaatttcttt

SEQ ID NO: 2219 - DNA, 536 bp, Homo sapiens
  misc_feature 494: n = A,T,C or G
actcactcaccctacctccagggcatagtcagtctgggctgagatccccatgatcagatatttgatggaaagtcctgaaaggccaatgagttggatggcaagaatgcaggcagtagctgctggataaaataggctacagccacctcagatgctttcagtgctctgtctgaggatgtgtatatgcatatgcaaactcgacccccgttcctgcccagataatggctcaataactctgaggctggttgctcagcctctgagggcaatacaggcatttaaaaaattaagatgaccaggcacagtggctcacgcctgtgatctcggcactttgggagactgaggtgggagcatcacttgagaccgggagtttgggaccaggctgggcaacacagggagacccctctctacaaaaacatttttaaaaaattagctgggtgtggtgatgcatgcctgtggtcccagttacttgggaggctgacgtgggtggctcacttgancacaggagtttgaggctgcagtgacctatgaccacatcactg

SEQ ID NO: 2220 - DNA, 347 bp, Homo sapiens
  misc_feature 337: n = A,T,C or G
acccatggtaaatgtaaatatactgtgtctcttttgggagagccttttagtagaggagtcttatatgagtctctacataagtagtttcacttgagttttgcagtttgaaatcttaaaggagctttaattgacatttattataccaattaagcttggaatggggcaatggatgcatttcccaaaacgtgtgaaagcactaacagcttatattgctgaatgagaatctcctgggtgtaatttagccacttagggaactgcgtgaacactcccaggccattatgatgctgttacagcttcagtgtataaatgcatgagtattctttctgttctgttttgngctctcttgt

SEQ ID NO: 2221 - DNA, 224 bp, Homo sapiens
acgaactccacggcggtggggcgctaactagcagggacccctgcaagtgttggtcgggggcctcgagctgcctgagctgacacgaggggaggggtctgtgtagccaacaggtgaccgaagggcttgcctgcccacagcttacttggccaaggggtttctgaagttcctgccggcaaacttagccttgctgcccagctcctcttcaattctgaggagctggttgt

SEQ ID NO: 2222 - DNA, 270 bp, Homo sapiens
acagagaaattcacaagtgtaaaaatattgcacattgacaaataccaagaatttttgcgtatgtttatattgtattgttctaaataatgggtagcctgtgaaataagatcttgccacccatgtaataatagtagtaatactatagttaaaatggctgtaagaatagttttataaaagtgaatacacagatctattgtatttgaaacataactttgacaattattagtgtgaccaaagtattaggcggttttcatacatttttcaccttgt

SEQ ID NO: 2223 - DNA, 394 bp, Homo sapiens
ctgcagaacaaatcaagcacatccttgctaatttcaaaaactaccagttctttattggtgaaaacatgaatccagatggcatggttgctctattggactaccgtgaggatggtgtgaccccatatatgattttctttaaggatggtttagaaatggaaaaatgttaacaaatgtggcaattattttggatctatcacctgtcatcataactggcttctgcttgtcatccacacaacaccaggacttaagacaaatgggactgatgtcatcttgagctcttcatttattttgactgtgatttatttggagtggaggcattgtttttaagaaaaacatgtcatgtaggttgtctaaaaataaaatgcatttaaactcaaaaaaaaaaaaaaaaaaa

SEQ ID NO: 2224 - DNA, 508 bp, Homo sapiens
  misc_feature 409, 447, 475, 493: n = A,T,C or G
acagataaggtaaggagcaatcctgtgaaagagttcataaatatcttttattttctaaaattcaatatacataagacattggtgtgattttacatttcttacattagaaataatggctcttgaactacttatttctatttgctatcccttagtttgctcttcagtctcttccattgtagtttttaaaagatgcttgcaattttttattctgagttgtaggtaatgcacataccgggggcattttttttttgtctccttaaaattttagagactttctggatttttgacttggaactggttcttcatccatcatcttatcttatataacccccttatatataacacccgggtgtgttctgagagtctgttcttaatttctttcctcaccaaatctctttcccaatgctgntgcaagaacatgtcctcctctgccatctgccattcctncttttcttactccacctacagtttcttnccttaaatattctccagngcagaatggctcaca

SEQ ID NO: 2225 - DNA, 129 bp, Homo sapiens
  misc_feature 14, 16, 92, 93, 103, 104: n = A,T,C or G
gaaagggagccacncnactgattggagggccctatcttgtgagtggggcatctgttggactttccacctggtcatatactctgcagctgttnnaatgtgcaannacttggggacagcatgagcttgctg

SEQ ID NO: 2226 - DNA, 490 bp, Homo sapiens
  misc_feature 477: n = A,T,C or G
gcgagtcgccgctgcagccctagtgactgcggcctgcatcccgattgtcttctcctccaaggtctacatgattacctgaagtttaataagtaagaccatgaattatggcatttcttaaatgaagcgttcaagaagtgagagaatgtcatagaaaataaatgatttttaagttatgtctattaatctgactgtagatatatatatttacctccttagtaatgcaagaagtgtttgtgggaagcagagaagcaagcaactgtatttcttgttctcacctaagcattactggaggataagccacatcagtctacaaagaggttttcatacaaacataataagatgtaaatggaccaaaagtgaagcacattcttgcagtaagcactgttactctccaagcaaccatggtttacatattgggattttgaaacttagcacttctgctcccaagggacttacaaaagtgaacatttgtatgtnccgtattaaaagt

SEQ ID NO: 2227 - DNA, 441 bp, Homo sapiens
  misc_feature 2, 13, 85, 299, 317, 349, 392, 393, 408, 411, 413, 418: n = A,T,C or G
tnctaaaacttgnttttcttaaaaaatagttgttgtaacattaaaccataacctaatcagtgtgttcactatgcttccacactanccagtcttctcacacttcttctggtttcaagtctcaaggcctgacagacagaagggcttggagattttttttctttacaattcagtcttcagcaacttgagagctttcttcatgttgtcaagcaacagagctgtatctgcaggttcgtaagcatagagacgatttgaatatcttccagtgatatcggctctaactgtcagagatgggtctgcanagataaatgaagcaaaanggaatggaatggtttgttttcaaacaacctgnatttattgccccggggagctgaagttcatgtattcatgtcctnngagggaatggagtgngtntncactnacaggagctctgatccatccact

SEQ ID NO: 2228 - DNA, 388 bp, Homo sapiens
  misc_feature 7, 16, 193, 370: n = A,T,C or G
tagcctncaaatgganggtgactggccctggctcctgctatgagaagataaccagcctcattttctcagtgccccagaggtctaggataggatttctaaactggaatcatccttaatcaccttgaagatcccttaagaggcatttgactggtgctgccgtctgtgtcctcaaagcaatgctggtggcagcgtnctgtgtacctgcccgagcggccgcccgggcaggtactaaaatagatgtaaaaaattctggatttgaaaactgttggtttttaaaagagaaatatttttaaattcttattttaggatgaggatatgttcatgaaatttgtaagtgaagatcttcatcgggtgtgcacttttaacaggnttgaacctattcatatag

SEQ ID NO: 2229 - DNA, 261 bp, Homo sapiens
  misc_feature 155: n = A,T,C or G
aggtactatagggtaaatacgggccctatttcaaagatttttaggggaattaattctaggacgatgggcatgaaactgtggtttgctccacagatttcagagcattgaccgtagtatacccccggtcgtgtagcggtgaaagtggtttggtttanacgtccgggaattgcatctgtttttaagcctaatgtggggacagctcatgagtgcaagacgtcttgtgatgtaattattatacgaatgggggcttcaatcgggagt

SEQ ID NO: 2230 - DNA, 466 bp, Homo sapiens
  misc_feature 453: n = A,T,C or G
gttttggtgtggatcgattctgtttgggacacactggcactgcagtagggaagctgttgacgcttggaggacttgggatttggtggtttgttgaccttattttgctaattactggagggctgatgccaagtgatggcagcaactggtgcactgtttactaaaaagagctgccatcatggcccagggaggcgggtgaaagctccgtcttctgaattcatctctacaggctcaaaactcctctttgatatcagacctgatgttattttccttcttttggagggcatttgtttggttaagaaggcttctttggactttggaatttcaacccagattttaccttgcagacggaatgacaagcaaaaagtgttgtggggaatcaaatttgttcctttcctcatgcacaaaacataaaggatagtggcgagtttacaagctgtggatgggtttccatantcttcctttctgt

SEQ ID NO: 2231 - DNA, 371 bp, Homo sapiens
  misc_feature 202, 218, 249, 275, 362: n = A,T,C or G
actgaaaaaaatgtctaaggcctttacagaaacatttttagtaatgaggatgagaactttttcaaatagcaaatatatattggcttaaagcatgaggctgtcttcagaaaagtgatgtggacataggaggcaatgtgtgagacttgggggttcaatattttatatagaagagttaataagcacatggtttacatttactcanctactatatatgcagngtggtgcacattttcacagaattctggcttnattaagatcattatttttgctgcgtngcttacagacttagcatattagttttttctactcctacaagtgtaaattgaaaaatctttatattaaaaaagtaaactgttatgaanctgctatgt

SEQ ID NO: 2232 - DNA, 2520 bp, Homo sapiens
gtgggaccgctgaccgcgcggctgctccgctctccccgctccaagcgccgatctgggcacccgccaccagcatggacgctcgccgcgtgccgcagaaagatctcagagtaaagaagaacttaaagaaattcagatatgtgaagttgatttccatggaaacctcgtcatcctctgatgacagttgtgacagctttgcttctgataattttgcaaacacgaggctgcagtcagttcgggaaggctgtaggacccgcagccagtgcaggcactctggacctctcagggtggcgatgaagtttccagcgcggagtaccaggggagcaaccaacaaaaaagcagagtcccgccagccctcagagaattctgtgactgattccaactccgattcagaagatgaaagtggaatgaattttttggagaaaagggctttaaatataaagcaaaacaaagcaatgcttgcaaaactcatgtctgaattagaaagcttccctggctcgttccgtggaagacatcccctcccaggctccgactcacaatcaaggagaccgcgaaggcgtacattcccgggtgttgcttccaggagaaaccctgaacggagagctcgtcctcttaccaggtcaaggtcccggatcctcgggtcccttgacgctctacccatggrgagagccagtttkgarkmtmwgtacatgttggtgagaaagaggaagaccgtggatggctacatgaatgaagatgacctgcccagaagccgtcgctccagatcatccgtgacccttccgcatataattcgcccagtggaagaaattacagaggaggagttggagaacgtctgcagcaattctcgagagaagatatataaccgttcactgggctctacttgtcatcaatgccgtcagaagactattgataccaaaacaaactgcagaaacccagactgctggggcgttcgaggccagttctgtggcccctgccttcgaaaccgttatggtgaagaggtcagggatgctctgctggatccgaactggcattgcccgccttgtcgaggaatctgcaactgcagtttctgccggcagcgagatggacggtgtgcgactggggtccttgtgtatttagccaaatatcatggctttgggaatgtgcatgcctacttgaaaagcctgaaacaggaatttgaaatgcaagcataatatctggaaaatttgctgcctgccttctacttctcaaatctttcttgtaaaagtttccaattttttcactgaaacctgagttaaaaatcttgatgatcagcctgtttcataagaaactccaatcaagttaatcttagcagacatgtgtttctggagcatcacagaaggtatattgctagttacactttgccctcctgcagtttcttctctgctcccaacccccatctcatagcatccccctctatttccaatgctcctctccaaccgcttagtttctgaatttcttttaaattacagttttatgaaagcatattttatttacttggtgttgaaatagccctcataaaacctaagcacttggaaacacaataatagtattaactaactagatctattgaatttcagagaagagccttctaacttgtttacacaaaaacgagtatgatttagcattcatactagttgaaatttttaatagaatcaaggcacaaaagtcttaaaaccatgtggaaaaattaggtaattattgcagattgatgtctctcaatcccatgtattgcgcttatgttacaagttgttgtcacagttgagacttaatttctcctaatttcttctgcccgaagggtaagtggtgcgtccagcttacacratcataattcaaaggttggtgggcaatgtaatacttaattaaaataatgatggaagagctatctggagattatgagtaagctgatttgaattttcagtataaaactttagtataattgtagtttgcaaagtttatttcagttcacatgtaaggtattgcaaataaattcttggacaattttgtatggaaacttgatattaaaaactagtctgtggttctttgcagtttcttgtaaatttataaaccaggcacaaggttcaagtttagattttaagcacttttataacaatgataagtgcctttttggagatgtaacttttagcagtttgttaacctgacatctctgccagtctagtttctgggcaggtttcctgtgtcagtattccccctcctctttgcattaatcaaggtatttggtagaggtggaatctaagtgtttgtatgtccaatttacttgcatatgtaaaccattgctgtgccattcaatgtttgatgcataattggaccttgaatcgataagtgtaaatacagcttttgatctgtaatgcttttatacaaaagtttattttaataataaaatgtttgttctaacttgtctgctttttttaaaaataatcttactgtacttaattctaattttttcctcatatttaaataaaaggccatttccaccttttctaaaaa

SEQ ID NO: 2233 - DNA, 3411 bp, Homo sapiens
  misc_feature 1554, 1555, 1556, 1557, 1558, 1559, 1560, 1561, 1562, 1563,1564, 1565, 1566, 1567, 1568, 1569, 1570, 1571, 1572, 1573,1574, 1575, 1576, 1577, 1578: n = A,T,C or G
gtgggaccgctgaccgcgcggctgctccgctctccccgctccaagcgccgatctgggcacccgccaccagcatggacgctcgccgcgtgccgcagaaagatctcagagtaaagaagaacttaaagaaattcagatatgtgaagttgatttccatggaaacctcgtcatcctctgatgacagttgtgacagctttgcttctgataattttgcaaacacgaggctgcagtcagttcgggaaggctgtaggacccgcagccagtgcaggcactctggacctctcagggtggcgatgaagtttccagcgcggagtaccaggggagcaaccaacaaaaaagcagagtcccgccagccctcagagaattctgtgactgattccaactccgattcagaagatgaaagtggaatgaattttttggagaaaagggctttaaatataaagcaaaacaaagcaatgcttgcaaaactcatgtctgaattagaaagcttccctggctcgttccgtggaagacatcccctcccaggctccgactcaaccagttcttgtttatatacagtagtgttttgggcacacctaaggtcgatctgtgttgtatttaaaaatctaatttctttatttgtgtggccttctagacaaacgaaggggacccagaggaaaccccctgacagatctctggatgatcctccttgaatcctgggcagtttggtctctccttgctgtgctcctgtggcactaaactccttttgattggttctttctttccttcccagctagactaagcccctcatgggcaggtaatgaagattgaaaacttttttctgttctccagtgtgagcacattcctcctacatggtagatgtgcaatagatgtttttaaaattggagaatgaaaataaaagaagaaaatcacaatttcttatcaagttgtagcttggtatcatacacaattgcattctgaggaattaaggtggtaccttagggagatttggtgtgtctgctgtgatagaaaagatttctttttcctagctttccctgaggaaaggaaagatggaaagagggaagccatacagatatccctctgttttgcagtgtagaaactgaatgtgtttctacagggtcaagagacatcagagaaatttttttttttttagaacagaagatcatttcttacatcttcattaagtaaaagaataaatagctcatctctcaagttgaaagaaactgggcttggtattattacaaaagcaaaattaaaatggccatataggttttaggctcattttgccatgcattatgcaaaggacaaagaaaaagaaaaaatagagctctctttacttaaaacatccttaaggagaagctatgaattccccaaagtactacttctctttattatggaataaatggattcccttatacgtgctttgtttagcaatcaaggagaccgcgaaggcgtacattcccgggtgttgcttccaggagaaaccctgaacggagagctcgtcctcttaccaggtcaaggtcccggatcctcgggtcccttgacgctctacccatnnnnnnnnnnnnnnnnnnnnnnnnntacatgttggtgagaaagaggaagaccgtggatggctacatgaatgaagatgacctgyccagaagccgtcgctccagatcatccgtgacccttccgcatataattcgcccagtggaagaaattacagaggaggagttggagaacgtctgcagcaattctcgagagaagatatatwaccgttcactgggctctacttgtcatcaatgccgtcagaagactattgataccaaaacaaactgcagaaacccagactgctggggcgttcgaggccmgttctgtggcccctgccttcgaaaccgttatggtgaagaggtcagggatgctctgctggatccgaactggcattgcccgccttgtcgaggaatctgcaactgcagtttctgccggcagcgagatggacggtgtgcgactggggtccttgtgtatttagccaaatatcatggctttgggaatgtgcatgcctacttgaaaagcctgaaacaggaatttgaaatgcaagcataatatctggaaaatttgctgcctgccttctacttctcaaatctttcttgtaaaagtttccaattttttcactgaaacctgagttaaaaatcttgatgatcagcctgtttcataagaaactccaatcaagttaatcttagcagacatgtgtttctggagcatcacagaaggtatattgctagttacactttgccctcctgcagtttcttctctgctcccaacccccatctcatagcatccccctctatttccaatgctcctctccaaccgcttagtttctgaatttcttttaaattacagttttatgaaagcatattttatttacttggtgttgaaatagccctcataaaacctaagcacttggaaacacaataatagtattaactaactagatctattgaatttcagagaagagccttctaacttgtttacacaaaaacgagtatgatttagcattcatactagttgaaatttttaatagaatcaaggcacaaaagtcttaaaaccatgtggaaaaattaggtaattattgcagattgatgtctctcaatcccatgtattgcgcttatgttacaagttgttgtcacagttgagacttaatttctcctaatttcttctgcccgaagggtaagtggtgccgtccagcttacacaatcataattcaaaggttggtgggcaatgtaatacttaattaaaataatgatggaagagctatctggagattatgagtaagctgatttgaattttcagtataaaactttagtataattgtagtttgcaaagtttatttcagttcacatgtaaggtattgcaaataaattcttggacaattttgtatggaaacttgatattaaaaactagtctgtggttctttgcagtttcttgtaaatttataaaccaggcacaaggttcaagtttagattttaagcacttttataacaatgataagtgcctttttggagatgtaacttttagcagtttgttaacctgacatctctgccagtctagtttctgggcaggtttcctgtgtcagtattccccctcckctttgcattaatcaaggtatttggtagaggtggaatctaagtgtttgtatgtccaatttacttgcatatgtaaaccattgctgtgccattcaatgtttgatgcataattggaccttgaatcgataagtgtaaatacagcttttgatctgtaatgcttttatacaaaagtttattttaataataaaatgtttgttctaacttgtctgctttttttaaaaataatcttactgtacttaattctaattttttcctcatatttaaataaaaggccatttccaccttttct

SEQ ID NO: 2234 - DNA, 1116 bp, Homo sapiens
atggacgctcgccgcgtgccgcagaaagatctcagagtaaagaagaacttaaagaaattcagatatgtgaagttgatttccatggaaacctcgtcatcctctgatgacagttgtgacagctttgcttctgataattttgcaaacacgaggctgcagtcagttcgggaaggctgtaggacccgcagccagtgcaggcactctggacctctcagggtggcgatgaagtttccagcgcggagtaccaggggagcaaccaacaaaaaagcagagtcccgccagccctcagagaattctgtgactgattccaactccgattcagaagatgaaagtggaatgaattttttggagaaaagggctttaaatataaagcaaaacaaagcaatgcttgcaaaactcatgtctgaattagaaagcttccctggctcgttccgtggaagacatcccctcccaggctccgactcacaatcaaggagaccgcgaaggcgtacattcccgggtgttgcttccaggagaaaccctgaacggagagctcgtcctcttaccaggtcaaggtcccggatcctcgggtcccttgacgctctacccatggrgagagccagtttkgarkmtmwgtacatgttggtgagaaagaggaagaccgtggatggctacatgaatgaagatgacctgcccagaagccgtcgctccagatcatccgtgacccttccgcatataattcgcccagtggaagaaattacagaggaggagttggagaacgtctgcagcaattctcgagagaagatatataaccgttcactgggctctacttgtcatcaatgccgtcagaagactattgataccaaaacaaactgcagaaacccagactgctggggcgttcgaggccagttctgtggcccctgccttcgaaaccgttatggtgaagaggtcagggatgctctgctggatccgaactggcattgcccgccttgtcgaggaatctgcaactgcagtttctgccggcagcgagatggacggtgtgcgactggggtccttgtgtatttagccaaatatcatggctttgggaatgtgcatgcctacttgaaaagcctgaaacaggaatttgaaatgcaagcataa

SEQ ID NO: 2235 - protein, 371 aa, Homo sapiens
  VARIANT 197, 201, 203, 204: Xaa = Any Amino Acid
MDARRVPQKDLRVKKNLKKFRYVKLISMETSSSSDDSCDSFASDNFANTRLQSVREGCRTRSQCRHSGPLRVAMKFPARSTRGATNKKAESRQPSENSVTDSNSDSEDESGMNFLEKRALNIKQNKAMLAKLMSELESFPGSFRGRHPLPGSDSQSRRPRRRTFPGVASRRNPERRARPLTRSRSRILGSLDALPMXRASXEXXYMLVRKRKTVDGYMNEDDLPRSRRSRSSVTLPHIIRPVEEITEEELENVCSNSREKIYNRSLGSTCHQCRQKTIDTKTNCRNPDCWGVRGQFCGPCLRNRYGEEVRDALLDPNWHCPPCRGICNCSFCRQRDGRCATGVLVYLAKYHGFGNVHAYLKSLKQEFEMQA

SEQ ID NO: 2236 - DNA, 21 bp, Artificial Sequence
  Primer
cacgacgttgtaaaacgacgg

SEQ ID NO: 2237 - DNA, 20 bp, Artificial Sequence
  Primer
cacaggaaacagctatgacc

SEQ ID NO: 2238 - DNA, 1176 bp, Homo sapiens
atgggcagcagccatcatcatcatcatcacagcagcggcctggtgccgcgcggcagccatatggacgctcgccgcgtgccgcagaaagatctcagagtaaagaagaacttaaagaaattcagatatgtgaagttgatttccatggaaacctcgtcatcctctgatgacagttgtgacagctttgcttctgataattttgcaaacacgaggctgcagtcagttcgggaaggctgtaggacccgcagccagtgcaggcactctggacctctcagggtggcgatgaagtttccagcgcggagtaccaggggagcaaccaacaaaaaagcagagtcccgccagccctcagagaattctgtgactgattccaactccgattcagaagatgaaagtggaatgaattttttggagaaaagggctttaaatataaagcaaaacaaagcaatgcttgcaaaactcatgtctgaattagaaagcttccctggctcgttccgtggaagacatcccctcccaggctccgactcacaatcaaggagaccgcgaaggcgtacattcccgggtgttgcttccaggagaaaccctgaacggagagctcgtcctcttaccaggtcaaggtcccggatcctcgggtcccttgacgctctacccatggaggaggaggaggaagaggataagtacatgttggtgagaaagaggaagaccgtggatggctacatgaatgaagatgacctgcccagaagccgtcgctccagatcatccgtgacccttccgcatataattcgcccagtggaagaaattacagaggaggagttggagaacgtctgcagcaattctcgagagaagatatataaccgttcactgggctctacttgtcatcaatgccgtcagaagactattgataccaaaacaaactgcagaaacccagactgctggggcgttcgaggccagttctgtggcccctgccttcgaaaccgttatggtgaagaggtcagggatgctctgctggatccgaactggcattgcccgccttgtcgaggaatctgcaactgcagtttctgccggcagcgagatggacggtgtgcgactggggtccttgtgtatttagccaaatatcatggctttgggaatgtgcatgcctacttgaaaagcctgaaacaggaatttgaaatgcaagcataa

SEQ ID NO: 2239 - protein, 391 aa, Homo sapiens
MGSSHHHHHHSSGLVPRGSHMDARRVPQKDLRVKKNLKKFRYVKLISMETSSSSDDSCDSFASDNFANTRLQSVREGCRTRSQCRHSGPLRVAMKFPARSTRGATNKKAESRQPSENSVTDSNSDSEDESGMNFLEKRALNIKQNKAMLAKLMSELESFPGSFRGRHPLPGSDSQSRRPRRRTFPGVASRRNPERRARPLTRSRSRILGSLDALPMEEEEEEDKYMLVRKRKTVDGYMNEDDLPRSRRSRSSVTLPHIIRPVEEITEEELENVCSNSREKIYNRSLGSTCHQCRQKTIDTKTNCRNPDCWGVRGQFCGPCLRNRYGEEVRDALLDPNWHCPPCRGICNCSFCRQRDGRCATGVLVYLAKYHGFGNVHAYLKSLKQEFEMQA

What is claimed is:

1. An isolated polynucleotide comprising a sequence selected from the group consisting of:
(a) sequences provided in SEQ ID NOs:1-2234 and 2238;
(b) complements of the sequences provided in SEQ ID NOs: 1-2234 and 2238;
(c) sequences consisting of at least 20 contiguous residues of a sequence provided in SEQ ID NOs:1-2234 and 2238;
(d) sequences that hybridize to a sequence provided in SEQ ID NOs:1-2234 and 2238, under moderately stringent conditions;
(e) sequences having at least 75% identity to a sequence of SEQ ID NOs:1-2234 and 2238;
(f) sequences having at least 90% identity to a sequence of SEQ ID NOs:1-2234 and 2238; and
(g) degenerate variants of a sequence provided in SEQ ID NOs:1-2234 and 2238.

2. An isolated polypeptide comprising an amino acid sequence selected from the group consisting of:
(a) sequences encoded by a polynucleotide of claim 1;
(b) sequences having at least 70% identity to a sequence encoded by a polynucleotide of claim 1; and
(c) sequences having at least 90% identity to a sequence encoded by a polynucleotide of claim 1;
(d) sequences provided in SEQ ID NOs:2235 and 2239;
(e) sequences having at least 70% identity to a sequence provided in SEQ ID NOs:2235 and 2239;
(f) sequences having at least 90% identity to a sequence provided in SEQ ID NOs:2235 and 2239.

3. An expression vector comprising a polynucleotide of claim 1 operably linked to an expression control sequence.

4. A host cell transformed or transfected with an expression vector according to claim 3.

5. An isolated antibody, or antigen-binding fragment thereof, that specifically binds to a polypeptide of claim 2.

6. A method for detecting the presence of a cancer in a patient, comprising the steps of:
(a) obtaining a biological sample from the patient;
(b) contacting the biological sample with a binding agent that binds to a polypeptide of claim 2;
(c) detecting in the sample an amount of polypeptide that binds to the binding agent; and
(d) comparing the amount of polypeptide to a predetermined cut-off value and therefrom determining the presence of a cancer in the patient.

7. A fusion protein comprising at least one polypeptide according to claim 2.

8. An oligonucleotide that hybridizes to a sequence recited in SEQ ID NOs:1-2234 and 2238 under moderately stringent conditions.

9. A method for stimulating and/or expanding T cells specific for a tumor protein, comprising contacting T cells with at least one component selected from the group consisting of:
(a) polypeptides according to claim 2;
(b) polynucleotides according to claim 1; and
(c) antigen-presenting cells that express a polynucleotide according to claim 1,
under conditions and for a time sufficient to permit the stimulation and/or expansion of T cells.

10. An isolated T cell population, comprising T cells prepared according to the method of claim 9.

11. A composition comprising a first component selected from the group consisting of physiologically acceptable carriers and immunostimulants, and a second component selected from the group consisting of:
(a) polypeptides according to claim 2;
(b) polynucleotides according to claim 1;
(c) antibodies according to claim 5;
(d) fusion proteins according to claim 7;
(e) T cell populations according to claim 10; and
(f) antigen presenting cells that express a polypeptide according to claim 2.

12. A method for stimulating an immune response in a patient, comprising administering to the patient a composition of claim 11.

13. A method for the treatment of a cancer in a patient, comprising administering to the patient a composition of claim 11.

14. A method for determining the presence of a cancer in a patient, comprising the steps of:
(a) obtaining a biological sample from the patient;
(b) contacting the biological sample with an oligonucleotide according to claim 8;
(c) detecting in the sample an amount of a polynucleotide that hybridizes to the oligonucleotide; and
(d) compare the amount of polynucleotide that hybridizes to the oligonucleotide to a predetermined cut-off value, and therefrom determining the presence of the cancer in the patient.

15. A diagnostic kit comprising at least one oligonucleotide according to claim 8.

16. A diagnostic kit comprising at least one antibody according to claim 5 and a detection reagent, wherein the detection reagent comprises a reporter group.

17. A method for inhibiting the development of a cancer in a patient, comprising the steps of:
(a) incubating CD4+ and/or CD8+ T cells isolated from a patient with at least one component selected from the group consisting of: (i) polypeptides according to claim 2; (ii) polynucleotides according to claim 1; and (iii) antigen presenting cells that express a polypeptide of claim 2, such that T cell proliferate;
(b) administering to the patient an effective amount of the proliferated T cells, and thereby inhibiting the development of a cancer in the patient.
